(19) United States
(12) Patent Application Publication
(10) Pub. No.: US 2026/0109972 A1
(43) Pub. Date: Apr. 23, 2026

(54) High-Throughput Discovery of Multi-Partite CRISPR-Based Editors

(71) Applicant: THE REGENTS OF THE UNIVERSITY OF CALIFORNIA, Oaklang, CA (US)

(72) Inventors: Luke A. Gilbert, San Francisco, CA (US); Greg Pommier, San Francisco, CA (US); Jonathan Weissman, San Francisco, CA (US); Caroline Wilson, San Francisco, CA (US)

(21) Appl. No.: 19/127,007

(22) PCT Filed: Nov. 9, 2023
(86) PCT No.: PCT/US2023/079280

§ 371 Date: May 2, 2025

Related U.S. Application Data
(60) Provisional application No. 63/424,049, filed on Nov. 9, 2022.
(60) Provisional application No. 63/463,832, filed on May 3, 2023.

(51) Int. Cl. C12N 15/10

(52) U.S. Cl. CPC C12N 15/1082

(57) ABSTRACT

Provided are methods for determining that a candidate polypeptide in a library of polypeptides has editing activity comprising expressing in a plurality of cells: a library of first expression cassettes each comprising a nucleic acid encoding a polypeptide wherein each polypeptide in the library comprises, a first editing domain, a first linker, a nuclease-deficient RNA guided endonuclease domain, a second linker, and a second editing domain; and a second expression cassette comprising a nucleic acid encoding a guide RNA directed to a target of interest, wherein said first and second expression cassettes are expressed in the plurality of cells; separating the plurality of cells based on the expression level of the target of interest; extracting genomic DNA (gDNA) from the plurality of cells; and sequencing the gDNA of cells that have a high level expression or a low level of expression of the target of interest.

### CROSS-REFERENCE TO RELATED APPLICATIONS

[0001] Pursuant to 35 U.S.C. § 119 (e), this application claims priority to the filing date of U.S. Provisional Patent Application Ser. No. 63/424,049 filed Nov. 9, 2022, and the filing date of U.S. Provisional Patent Application Ser. No. 63/463,832 filed May 3, 2023 the disclosure of which applications are herein incorporated by reference.

### STATEMENT REGARDING FEDERALLY SPONSORED RESEARCH

[0002] This invention was made with government support under Grant Number HRO0111920007 awarded by the National Institutes of Health. The government has certain rights in the invention.

### REFERENCE TO AN ELECTRONIC SEQUENCE LISTING

[0003] The contents of the electronic sequence listing (UCSF-692WO_Seq_List.xml; Size: 1,652,402 bytes; and Date of Creation: Nov. 8, 2023) is herein incorporated by reference in its entirety.

### INTRODUCTION

[0004] Although considered a promising therapeutic approach for the treatment of disease, genome editing carries inherent risks due to the potential for genotoxicity from double-strand breaks. Further, genome editing often is associated with an all-or-none effect on the target gene (i.e., it produces a full knockout). In contrast, targeted epigenome engineering does not carry the risk of DSB-induced genotoxicity; further, it affords the opportunity to create a more graded effect on gene expression and thus function from a complete silencing through a less pronounced effect. The discovery of novel epigenomic editing proteins is needed. Provided herein are methods for identifying novel epigenomic editing proteins.

### SUMMARY

[0005] The present disclosure provides methods for determining that a candidate polypeptide in a library of polypeptides has editing activity comprising expressing in a plurality of cells: a library of first expression cassettes each comprising a nucleic acid encoding a polypeptide wherein each polypeptide in the library comprises, in order, a first editing domain, a first linker, a nuclease-deficient RNA guided endonuclease domain, a second linker, and a second editing domain; and a second expression cassette comprising a nucleic acid encoding a guide RNA directed to a target of interest, wherein said first and second expression cassettes are expressed in the plurality of cells; separating the plurality of cells based on the expression level of the target of interest; extracting genomic DNA (gDNA) from the plurality of cells; and sequencing the gDNA of cells that have a high level expression or a low level of expression of the target of interest thereby determining that the candidate polypeptide has editing activity.

### BRIEF DESCRIPTION OF THE DRAWINGS

[0006] FIG. 1. Schematic representation of library generation. Top: Design for combinatorial domain library generation, with 37×37 combinations for library 1 (L1) and 347×347 elements for library 2 (L2), with two library elements listed in positions 1 and 2. Bottom: Construct design for dual transcriptional effectors, with N and C termini elements fused to dCas9 via two linker sequences.

[0007] FIG. 2. Experimental workflow. N and C-termini DNA elements were synthesized and assembled into dual-dCas9 effector domains. Constructs were packed into lentivirus and infected into sgRNA expressing cells, followed by selection for library integration. Target gene of interest (CD55) expression was assayed at the final timepoints (day 8) and cells were sorted based on CD55 expression, followed by gDNA extraction, dual-domain amplification by PCR, library preparation, and PacBio long read sequencing.

[0008] FIG. 3. Library 1 (37×37) targeting CD55 in K562s replicates. Log transformed domain counts (fraction of total reads) per replicate for each sample; unsorted (left), CD55^{high} (middle), and CD55^{low} (right).

[0009] FIG. 4. Library 1 screen at CD55 identifies 187 significant hits. Colored points (red, green, blue) represent significant hits (pvalue<=0.05), including significant activators (blue, log 2FC>=1) and significant CD55 repressors (red, log 2FC<=−1).

[0010] FIG. 5A-FIG. 5B. Library 1 targeting CD55 showing replicates plotted against each other with Log 2(CD55^{High}/CD55^{LOW}), where x-axis=Replicate 1 and y-axis=Replicate 2. Points are colored by fusion protein length (base pairs). “VPR_JKNp64” emerged on the activating side (FIG. 5B), as this was the activation control, and “Gilbert_Lab_CRISPRi_KRAB” (CRISPR inhibition) domain emerged on the repressive plot (FIG. 5A).

[0011] FIG. 6A-FIG. 6B. Library 2 replicates are highly correlated. Library 2 replicates for CD55^{HIGH} (FIG. 6A) and CD55^{LOW} (FIG. 6B) samples. Pearson correlation coefficient (R): CD55^{HIGH}=0.94, CD5^{LOW} 0.90.

[0012] FIG. 7. Library 2 screen at CD55 identifies 3709 significant hits. Colored points (red, green, blue) represent significant hits (pvalue<=0.05), including significant activators (blue, log 2FC>=1) and significant CD55 repressors (red, log 2FC<=−1).

[0013] FIG. 8. Library 2 screen at CD55 identifies 3709 significant hits. Colored points indicate domain length (N-dCa9-C total length, bp). A subset of domains are labeled.

[0014] FIG. 9. SETD1A-KDM5A effector combinations exhibit position specific effects at CD55.

[0015] FIG. 10. Workflow for processing long read sequencing data. Pacbio subread BAM files are exported from Sequel II and ccs is run to generate HiFi reads. Reads are demultiplexed using lima and aligned to the domain library reference. Alignments are counted and counts per domain are normalized for downstream analyses.

[0016] FIG. 11. Gel electrophoresis analysis of pooled and processed gDNAs.

### DEFINITIONS

[0017] The terms “polynucleotide” and “nucleic acid,” used interchangeably herein, refer to a polymeric form of nucleotides of any length, either ribonucleotides or deoxyribonucleotides. Thus, terms “polynucleotide” and “nucleic acid” encompass single-stranded DNA; double-stranded DNA; multi-stranded DNA; single-stranded RNA; double-stranded RNA; multi-stranded RNA; genomic DNA; cDNA; DNA-RNA hybrids; and a polymer comprising purine and pyrimidine bases or other natural, chemically or biochemically modified, non-natural, or derivatized nucleotide bases.

[0018] By “hybridizable” or “complementary” or “substantially complementary” it is meant that a nucleic acid (e.g. RNA, DNA) comprises a sequence of nucleotides that enables it to non-covalently bind, i.e. form Watson-Crick base pairs and/or G/U base pairs, “anneal”, or “hybridize,” to another nucleic acid in a sequence-specific, antiparallel, manner (i.e., a nucleic acid specifically binds to a complementary nucleic acid) under the appropriate in vitro and/or in vivo conditions of temperature and solution ionic strength. Standard Watson-Crick base-pairing includes: adenine/adenosine) (A) pairing with thymidine/thymidine (T), A pairing with uracil/uridine (U), and guanine/guanosine) (G) pairing with cytosine/cytidine (C). In addition, for hybridization between two RNA molecules (e.g., dsRNA), and for hybridization of a DNA molecule with an RNA molecule (e.g., when a DNA target nucleic acid base pairs with a guide RNA, etc.): G can also base pair with U. For example, G/U base-pairing is partially responsible for the degeneracy (i.e., redundancy) of the genetic code in the context of tRNA anti-codon base-pairing with codons in mRNA. Thus, in the context of this disclosure, a G (e.g., of a protein-binding segment (e.g., dsRNA duplex) of a guide RNA molecule; of a target nucleic acid (e.g., target DNA) base pairing with a guide RNA) is considered complementary to both a U and to C. For example, when a G/U base-pair can be made at a given nucleotide position of a protein-binding segment (e.g., dsRNA duplex) of a guide RNA molecule, the position is not considered to be non-complementary, but is instead considered to be complementary.

[0019] Hybridization requires that the two nucleic acids contain complementary sequences, although mismatches between bases are possible. The conditions appropriate for hybridization between two nucleic acids depend on the length of the nucleic acids and the degree of complementarity, variables well known in the art. The greater the degree of complementarity between two nucleotide sequences, the greater the value of the melting temperature (Tm) for hybrids of nucleic acids having those sequences. Typically, the length for a hybridizable nucleic acid is 8 nucleotides or more (e.g., 10 nucleotides or more, 12 nucleotides or more, 15 nucleotides or more, 20 nucleotides or more, 22 nucleotides or more, 25 nucleotides or more, or 30 nucleotides or more).

[0020] It is understood that the sequence of a polynucleotide need not be 100% complementary to that of its target nucleic acid to be specifically hybridizable. Moreover, a polynucleotide may hybridize over one or more segments such that intervening or adjacent segments are not involved in the hybridization event (e.g., a loop structure or hairpin structure, a ‘bulge’, and the like). A polynucleotide can comprise 60% or more, 65% or more, 70% or more, 75% or more, 80% or more, 85% or more, 90% or more, 95% or more, 98% or more, 99% or more, 99.5% or more, or 100% sequence complementarity to a target region within the target nucleic acid sequence to which it will hybridize. For example, an antisense nucleic acid in which 18 of 20 nucleotides of the antisense compound are complementary to a target region, and would therefore specifically hybridize, would represent 90 percent complementarity. The remaining noncomplementary nucleotides may be clustered or interspersed with complementary nucleotides and need not be contiguous to each other or to complementary nucleotides. Percent complementarity between particular stretches of nucleic acid sequences within nucleic acids can be determined using any convenient method. Example methods include BLAST programs (basic local alignment search tools) and PowerBLAST programs (Altschul et al., J. Mol. Biol., 1990, 215, 403-410; Zhang and Madden, Genome Res., 1997, 7, 649-656) or by using the Gap program (Wisconsin Sequence Analysis Package, Version 8 for Unix, Genetics Computer Group, University Research Park, Madison Wis.), e.g., using default settings, which uses the algorithm of Smith and Waterman (Adv. Appl. Math., 1981, 2, 482-489).

[0021] The terms “peptide,” “polypeptide,” and “protein” are used interchangeably herein, and refer to a polymeric form of amino acids of any length, which can include coded and non-coded amino acids, chemically or biochemically modified or derivatized amino acids, and polypeptides having modified peptide backbones.

[0022] “Binding” as used herein (e.g. with reference to an RNA-binding domain of a polypeptide, binding to a target nucleic acid, and the like) refers to a non-covalent interaction between macromolecules (e.g., between a protein and a nucleic acid; between a guide RNA and a target nucleic acid; and the like). While in a state of non-covalent interaction, the macromolecules are said to be “associated” or “interacting” or “binding” (e.g., when a molecule X is said to interact with a molecule Y, it is meant the molecule X binds to molecule Y in a non-covalent manner). Not all components of a binding interaction need be sequence-specific (e.g., contacts with phosphate residues in a DNA backbone), but some portions of a binding interaction may be sequence-specific. Binding interactions are generally characterized by a dissociation constant (K_{d}) of less than 10⁻⁶ M, less than 10⁻⁷ M, less than 10⁻⁸ M, less than 10⁻⁹ M, less than 10⁻¹⁰ M, less than 10⁻¹¹ M, less than 10⁻¹² M, less than 10⁻¹³ M, less than 10⁻¹⁴ M, or less than 10⁻¹⁵ M. “Affinity” refers to the strength of binding, increased binding affinity being correlated with a lower K_{d}.

[0023] By “binding domain” it is meant a protein domain that is able to bind non-covalently to another molecule. A binding domain can bind to, for example, an RNA molecule (an RNA-binding domain) and/or a protein molecule (a protein-binding domain). In the case of a protein having a protein-binding domain, it can in some cases bind to itself (to form homodimers, homotrimers, etc.) and/or it can bind to one or more regions of a different protein or proteins.

[0024] The term “conservative amino acid substitution” refers to the interchangeability in proteins of amino acid residues having similar side chains. For example, a group of amino acids having aliphatic side chains consists of glycine, alanine, valine, leucine, and isoleucine; a group of amino acids having aliphatic-hydroxyl side chains consists of serine and threonine; a group of amino acids having amide containing side chains consisting of asparagine and glutamine; a group of amino acids having aromatic side chains consists of phenylalanine, tyrosine, and tryptophan; a group of amino acids having basic side chains consists of lysine, arginine, and histidine; a group of amino acids having acidic side chains consists of glutamate and aspartate; and a group of amino acids having sulfur containing side chains consists of cysteine and methionine. Exemplary conservative amino acid substitution groups are: valine-leucine-isoleucine, phenylalanine-tyrosine, lysine-arginine, alanine-valine-glycine, and asparagine-glutamine. Coded amino acids (followed in parentheses by their corresponding three-letter codes and one-letter codes) include: alanine (Ala; A), arginine (Arg; R), asparagine (Asn; N), aspartic acid (Asp; D), cysteine (Cys; C), glutamic acid (Glu; E), glutamine (Gln; Q), glycine (Gly; G), histidine (His; H), isoleucine (Ile; I), leucine (Leu; L), lysine (Lys; K), methionine (Met; M), phenylalanine (Phe; F); proline (Pro; P), serine (Ser; S), threonine (Thr; T), tryptophan (Trp; W), tyrosine (Tyr; Y), or valine (Val; V)

[0025] A polynucleotide or polypeptide has a certain percent “sequence identity” to another polynucleotide or polypeptide, meaning that, when aligned, that percentage of bases or amino acids are the same, and in the same relative position, when comparing the two sequences. Sequence identity can be determined in a number of different ways. To determine sequence identity, sequences can be aligned using various methods and computer programs (e.g., BLAST, T-COFFEE, MUSCLE, MAFFT, Phyre2, etc.), available over the world wide web at sites including ncbi.nlm.nili.gov/BLAST, ebi.ac.uk/Tools/msa/tcoffee/, ebi.ac.uk/Tools/msa/muscle/, mafft.cbrc.jp/alignment/software/, http://www.sbg.bio.ic.ac.uk/-phyre2/. See, e.g., Altschul et al. (1990), J. Mol. Bioi. 215:403-10.

[0026] The terms “DNA regulatory sequences,” “control elements,” and “regulatory elements,” used interchangeably herein, refer to transcriptional and translational control sequences, such as promoters, enhancers, polyadenylation signals, terminators, protein degradation signals, and the like, that provide for and/or regulate transcription of a non-coding sequence (e.g., guide RNA) or a coding sequence (e.g., protein coding) and/or regulate translation of an encoded polypeptide.

[0027] As used herein, a “promoter sequence” is a DNA regulatory region capable of binding RNA polymerase and initiating transcription of a downstream (3′ direction) coding or non-coding sequence. Eukaryotic promoters will often, but not always, contain “TATA” boxes and “CAT” boxes. Various promoters, including inducible promoters, may be used to drive the various nucleic acids (e.g., vectors) of the present disclosure.

[0028] The term “naturally-occurring” or “unmodified” or “wild type” as used herein as applied to a nucleic acid, a polypeptide, a cell, or an organism, refers to a nucleic acid, polypeptide, cell, or organism that is found in nature.

[0029] “Recombinant,” as used herein, means that a particular nucleic acid (DNA or RNA) is the product of various combinations of cloning, restriction, polymerase chain reaction (PCR) and/or ligation steps resulting in a construct having a structural coding or non-coding sequence distinguishable from endogenous nucleic acids found in natural systems. DNA sequences encoding polypeptides can be assembled from cDNA fragments or from a series of synthetic oligonucleotides, to provide a synthetic nucleic acid which is capable of being expressed from a recombinant transcriptional unit contained in a cell or in a cell-free transcription and translation system. Genomic DNA comprising the relevant sequences can also be used in the formation of a recombinant gene or transcriptional unit. Sequences of non-translated DNA may be present 5′ or 3′ from the open reading frame, where such sequences do not interfere with manipulation or expression of the coding regions, and may indeed act to modulate production of a desired product by various mechanisms (see “DNA regulatory sequences”, above). Alternatively, DNA sequences encoding RNA (e.g., guide RNA) that is not translated may also be considered recombinant. Thus, e.g., the term “recombinant” nucleic acid refers to one which is not naturally occurring, e.g., is made by the artificial combination of two otherwise separated segments of sequence through human intervention. This artificial combination is often accomplished by either chemical synthesis means, or by the artificial manipulation of isolated segments of nucleic acids, e.g., by genetic engineering techniques. Such is usually done to replace a codon with a codon encoding the same amino acid, a conservative amino acid, or a non-conservative amino acid. Alternatively, it is performed to join together nucleic acid segments of desired functions to generate a desired combination of functions. This artificial combination is often accomplished by either chemical synthesis means, or by the artificial manipulation of isolated segments of nucleic acids, e.g., by genetic engineering techniques. When a recombinant polynucleotide encodes a polypeptide, the sequence of the encoded polypeptide can be naturally occurring (“wild type”) or can be a variant (e.g., a mutant) of the naturally occurring sequence. Thus, the term “recombinant” polypeptide does not necessarily refer to a polypeptide whose sequence does not naturally occur. Instead, a “recombinant” polypeptide is encoded by a recombinant DNA sequence, but the sequence of the polypeptide can be naturally occurring (“wild type”) or non-naturally occurring (e.g., a variant, a mutant, etc.). Thus, a “recombinant” polypeptide is the result of human intervention, but may have a naturally occurring amino acid sequence.

[0030] A “vector” or “expression vector” is a replicon, such as plasmid, phage, virus, or cosmid, to which another DNA segment, i.e. an “insert”, may be attached so as to bring about the replication of the attached segment in a cell.

[0031] An “expression cassette” comprises a DNA coding sequence operably linked to a promoter. “Operably linked” refers to a juxtaposition wherein the components so described are in a relationship permitting them to function in their intended manner. For instance, a promoter is operably linked to a coding sequence if the promoter affects its transcription or expression.

[0032] The terms “recombinant expression vector,” or “DNA construct” are used interchangeably herein to refer to a DNA molecule comprising a vector and one insert. Recombinant expression vectors are usually generated for the purpose of expressing and/or propagating the insert(s), or for the construction of other recombinant nucleotide sequences. The insert(s) may or may not be operably linked to a promoter sequence and may or may not be operably linked to DNA regulatory sequences.

[0033] “Heterologous,” as used herein, refers to a nucleotide or polypeptide sequence that is not found in the native nucleic acid or protein, respectively. For example, relative to a variant type V CRISPR/Cas effector polypeptide of the present disclosure, a heterologous polypeptide comprises an amino acid sequence from a protein other than the variant type V CRISPR/Cas effector polypeptide. As another example, a variant type V CRISPR/Cas effector polypeptide of the present disclosure can be fused to an active domain from a non-CRISPR/Cas effector protein (e.g., a histone deacetylase), and the sequence of the active domain could be considered a heterologous polypeptide (it is heterologous to the variant type V CRISPR/Cas effector polypeptide). As another example, a guide sequence of a guide RNA that is heterologous to a protein-binding sequence of a guide RNA is a guide sequence that is not found in nature together with the protein-binding sequence.

[0034] The term “nuclease-deficient RNA-guided DNA endonuclease domain” and the like refer, in the usual and customary sense, to an RNA-guided DNA endonuclease (e.g. a mutated form of a naturally occurring RNA-guided DNA endonuclease) that targets a specific phosphodiester bond within a DNA polynucleotide, wherein the recognition of the phosphodiester bond is facilitated by a separate polynucleotide sequence (for example, a RNA sequence (e.g., a guide RNA or a single guide RNA (sgRNA)), but is incapable of cleaving the target phosphodiester bond to a significant degree (e.g. there is no measurable cleavage of the phosphodiester bond under physiological conditions). A nuclease-deficient RNA-guided DNA endonuclease thus retains DNA-binding ability (e.g. specific binding to a target sequence) when complexed with a polynucleotide (e.g., gRNA or sgRNA), but lacks significant endonuclease activity (e.g. any amount of detectable endonuclease activity). In aspects, the nuclease-deficient RNA-guided DNA endonuclease enzyme is a CRISPR-associated protein. In aspects, the nuclease-deficient RNA-guided DNA endonuclease enzyme is dCas9, dCpf1, ddCpf1, Cas-phi, a nuclease-deficient Cas9 variant, a nuclease-deficient Class II CRISPR endonuclease, a zinc finger domain, a transcription activator-like effector (TALE), a leucine zipper domain, a winged helix domain, a helix-turn-helix motif, a helix-loop-helix domain, an HMB-box domain, a Wor3 domain, an OB-fold domain, an immunoglobulin domain, or a B3 domain. In aspects, the nuclease-deficient RNA-guided DNA endonuclease enzyme is a zinc finger domain, a leucine zipper domain, a winged helix domain, a helix-turn-helix motif, a helix-loop-helix domain, an HMB-box domain, a Wor3 domain, an OB-fold domain, an immunoglobulin domain, or a B3 domain. In aspects, the nuclease-deficient RNA-guided DNA endonuclease enzyme is a leucine zipper domain. In aspects, the nuclease-deficient RNA-guided DNA endonuclease enzyme is a winged helix domain. In aspects, the nuclease-deficient RNA-guided DNA endonuclease enzyme is a helix-turn-helix motif. In aspects, the nuclease-deficient RNA-guided DNA endonuclease enzyme is a helix-loop-helix domain. In aspects, the nuclease-deficient RNA-guided DNA endonuclease enzyme is an HMB-box domain. In aspects, the nuclease-deficient RNA-guided DNA endonuclease enzyme is a Wor3 domain. In aspects, the nuclease-deficient RNA-guided DNA endonuclease enzyme is an OB-fold domain. In aspects, the nuclease-deficient RNA-guided DNA endonuclease enzyme is an immunoglobulin domain. In aspects, the nuclease-deficient RNA-guided DNA endonuclease enzyme is a B3 domain. In aspects, the nuclease-deficient RNA-guided DNA endonuclease enzyme is dCas9, ddCpf1, Cas-phi, a nuclease-deficient Cas9 variant, or a nuclease-deficient Class II CRISPR endonuclease. In aspects, the nuclease-deficient RNA-guided DNA endonuclease enzyme is dCas9. In aspects, the nuclease-deficient RNA-guided DNA endonuclease enzyme is dCas9 from S. pyogenes. In aspects, the nuclease-deficient RNA-guided DNA endonuclease enzyme is dCas9 from S. aureus. In aspects, the nuclease-deficient RNA-guided DNA endonuclease enzyme is dCas 12a from Lachnospiracea (dLbCas12a). In aspects, the nuclease-deficient RNA-guided DNA endonuclease enzyme is dCas12a from Lachnospiracea bacterium. In aspects, the nuclease-deficient RNA-guided DNA endonuclease enzyme is dCas12a. In aspects, the nuclease-deficient RNA-guided DNA endonuclease enzyme is dCas12. In aspects, the nuclease-deficient RNA-guided DNA endonuclease enzyme is ddCas 12a. In aspects, the nuclease-deficient RNA-guided DNA endonuclease enzyme is Cas-phi.

[0035] In embodiments, the nuclease-deficient RNA-guided DNA endonuclease enzyme is dCas9. The terms “dCas9” or “dCas9 protein” as referred to herein is a Cas9 protein in which both catalytic sites for endonuclease activity are defective or lack activity. In aspects, the dCas9 protein has mutations at positions corresponding to D10A and H840A of S. pyogenes Cas9. In aspects, the dCas9 protein lacks endonuclease activity due to point mutations at both endonuclease catalytic sites (RuvC and HNH) of wild type Cas9. The point mutations can be D10A and H840A. In aspects, the dCas9 has substantially no detectable endonuclease (e.g., endodeoxyribonuclease) activity. In aspects, dCas9 includes the amino acid sequence of SEQ ID NO:1. In aspects, dCas9 has the amino acid sequence of SEQ ID NO:1. In aspects, dCas9 has an amino acid sequence that has at least 50%, 55%, 60%, 65%, 70%, 75%, 80%, 85%, 90%, 91%, 92%, 93%, 94%, 95%, 96%, 97%, 98%, 99% or 100% sequence identity to SEQ ID NO:1. In aspects, dCas9 has an amino acid sequence that has at least 75% sequence identity to SEQ ID NO: 1. In aspects, dCas9 has an amino acid sequence that has at least 80% sequence identity to SEQ ID NO:1. In aspects, dCas9 has an amino acid sequence that has at least 85% sequence identity to SEQ ID NO: 1. In aspects, dCas9 has an amino acid sequence that has at least 90% sequence identity to SEQ ID NO: 1. In aspects, dCas9 has an amino acid sequence that has at least 95% sequence identity to SEQ ID NO:1. In embodiments, the nuclease-deficient RNA-guided DNA endonuclease enzyme is dCas9 from S. pyogenes. In embodiments, the nuclease-deficient RNA-guided DNA endonuclease enzyme is dCas9 from S. aureus.

(SEQ ID NO: 1)
MDKKYSIGLAIGTNSVGWAVITDEYKVPSKKFKVLGNTDRHSIKKNLIGA
LLFDSGETAEATRLKRTARRRYTRRKNRICYLQEIFSNEMAKVDDSFFHR
LEESFLVEEDKKHERHPIFGNIVDEVAYHEKYPTIYHLRKKLVDSTDKAD
LRLIYLALAHMIKFRGHFLIEGDLNPDNSDVDKLFIQLVQTYNQLFEENP
INASGVDAKAILSARLSKSRRLENLIAQLPGEKKNGLFGNLIALSLGLTP
NFKSNFDLAEDAKLQLSKDTYDDDLDNLLAQIGDQYADLFLAAKNLSDAI
LLSDILRVNTEITKAPLSASMIKRYDEHHQDLTLLKALVRQQLPEKYKEI
FFDQSKNGYAGYIDGGASQEEFYKFIKPILEKMDGTEELLVKLNREDLLR
KQRTFDNGSIPHQIHLGELHAILRRQEDFYPFLKDNREKIEKILTFRIPY
YVGPLARGNSRFAWMTRKSEETITPWNFEEVVDKGASAQSFIERMTNFDK
NLPNEKVLPKHSLLYEYFTVYNELTKVKYVTEGMRKPAFLSGEQKKAIVD
LLFKTNRKVTVKQLKEDYFKKIECFDSVEISGVEDRFNASLGTYHDLLKI
IKDKDFLDNEENEDILEDIVLTLTLFEDREMIEERLKTYAHLFDDKVMKQ
LKRRRYTGWGRLSRKLINGIRDKQSGKTILDFLKSDGFANRNFMQLIHDD
SLTFKEDIQKAQVSGQGDSLHEHIANLAGSPAIKKGILQTVKVVDELVKV
MGRHKPENIVIEMARENQTTQKGQKNSRERMKRIEEGIKELGSQILKEHP
VENTQLQNEKLYLYYLONGRDMYVDQELDINRLSDYDVDAIVPQSFLKDD
SIDNKVLTRSDKNRGKSDNVPSEEVVKKMKNYWRQLLNAKLITQRKFDNL
TKAERGGLSELDKAGFIKRQLVETRQITKHVAQILDSRMNTKYDENDKLI
REVKVITLKSKLVSDFRKDFQFYKVREINNYHHAHDAYLNAVVGTALIKK
YPKLESEFVYGDYKVYDVRKMIAKSEQEIGKATAKYFFYSNIMNFFKTEI
TLANGEIRKRPLIETNGETGEIVWDKGRDFATVRKVLSMPQVNIVKKTEV
QTGGFSKESILPKRNSDKLIARKKDWDPKKYGGFDSPTVAYSVLVVAKVE
KGKSKKLKSVKELLGITIMERSSFEKNPIDFLEAKGYKEVKKDLIIKLPK
YSLFELENGRKRMLASAGELQKGNELALPSKYVNFLYLASHYEKLKGSPE
DNEQKQLFVEQHKHYLDEIIEQISEFSKRVILADANLDKVLSAYNKHRDK
PIREQAENIIHLFTLTNLGAPAAFKYFDTTIDRKRYTSTKEVLDATLIHQ
SITGLYETRIDLSQLGGD

[0036] In embodiments, the nuclease-deficient RNA-guided DNA endonuclease enzyme is “ddCpf1” or “ddCas 12a”. The terms “DNAse-dead Cpf1” or “ddCpf1” refer to mutated Acidaminococcus sp. Cpf1 (AsCpf1) resulting in the inactivation of Cpf1 DNAse activity. In aspects, ddCpf1 includes an E993A mutation in the RuvC domain of AsCpf1. In aspects, the ddCpf1 has substantially no detectable endonuclease (e.g., endodeoxyribonuclease) activity. In aspects, ddCpf1 includes the amino acid sequence of SEQ ID NO:2. In aspects, ddCpf1 has the amino acid sequence of SEQ ID NO:2. In aspects, ddCpf1 has an amino acid sequence that has at least 50%, 55%, 60%, 65%, 70%, 75%, 80%, 85%, 90%, 91%, 92%, 93%, 94%, 95%, 96%, 97%, 98%, 99% or 100% sequence identity to SEQ ID NO:2. In aspects, ddCpf1 has an amino acid sequence that has at least 75% sequence identity to SEQ ID NO:2. In aspects, ddCpf1 has an amino acid sequence that has at least 80% sequence identity to SEQ ID NO:2. In aspects, ddCpf1 has an amino acid sequence that has at least 85% sequence identity to SEQ ID NO:2. In aspects, ddCpf1 has an amino acid sequence that has at least 90% sequence identity to SEQ ID NO:2. In aspects, ddCpf1 has an amino acid sequence that has at least 95% sequence identity to SEQ ID NO:2. In aspects, the nuclease-deficient RNA-guided DNA endonuclease enzyme is dCas 12a from Lachnospiracea bacterium.

(SEQ ID NO: 2)
MTQFEGFTNLYQVSKTLRFELIPQGKTLKHIQEQGFIEEDKARNDHYKEL
KPIIDRIYKTYADQCLQLVQLDWENLSAAIDSYRKEKTEETRNALIEEQA
TYRNAIHDYFIGRTDNLTDAINKRHAEIYKGLFKAELFNGKVLKQLGTVT
TTEHENALLRSFDKFTTYFSGFYENRKNVFSAEDISTAIPHRIVQDNFPK
FKENCHIFTRLITAVPSLREHFENVKKAIGIFVSTSIEEVFSFPFYNQLL
TQTQIDLYNQLLGGISREAGTEKIKGLNEVLNLAIQKNDETAHIIASLPH
RFIPLFKQILSDRNTLSFILEEFKSDEEVIQSFCKYKTLLRNENVLETAE
ALFNELNSIDLTHIFISHKKLETISSALCDHWDTLRNALYERRISELTGK
ITKSAKEKVQRSLKHEDINLQEIISAAGKELSEAFKQKTSEILSHAHAAL
DQPLPTTLKKQEEKEILKSQLDSLLGLYHLLDWFAVDESNEVDPEFSARL
TGIKLEMEPSLSFYNKARNYATKKPYSVEKFKLNFQMPTLASGWDVNKEK
NNGAILFVKNGLYYLGIMPKQKGRYKALSFEPTEKTSEGFDKMYYDYFPD
AAKMIPKCSTQLKAVTAHFQTHTTPILLSNNFIEPLEITKEIYDLNNPEK
EPKKFQTAYAKKTGDQKGYREALCKWIDFTRDFLSKYTKTTSIDLSSLRP
SSQYKDLGEYYAELNPLLYHISFQRIAEKEIMDAVETGKLYLFQIYNKDF
AKGHHGKPNLHTLYWTGLFSPENLAKTSIKLNGQAELFYRPKSRMKRMAH
RLGEKMLNKKLKDQKTPIPDTLYQELYDYVNHRLSHDLSDEARALLPNVI
TKEVSHEIIKDRRFTSDKFFFHVPITLNYQAANSPSKFNQRVNAYLKEHP
ETPIIGIDRGERNLIYITVIDSTGKILEQRSLNTIQQFDYQKKLDNREKE
RVAARQAWSVVGTIKDLKQGYLSQVIHEIVDLMIHYQAVVVLANLNFGFK
SKRTGIAEKAVYQQFEKMLIDKLNCLVLKDYPAEKVGGVLNPYQLTDQFT
SFAKMGTQSGFLFYVPAPYTSKIDPLTGFVDPFVWKTIKNHESRKHFLEG
FDFLHYDVKTGDFILHFKMNRNLSFQRGLPGFMPAWDIVFEKNETQFDAK
GTPFIAGKRIVPVIENHRFTGRYRDLYPANELIALLEEKGIVFRDGSNIL
PKLLENDDSHAIDTMVALIRSVLQMRNSNAATGEDYINSPVRDLNGVCFD
SRFQNPEWPMDADANGAYHIALKGQLLLNHLKESKDLKLQNGISNQDWLA
YIQELRN

[0037] In embodiments, the nuclease-deficient RNA-guided DNA endonuclease enzyme is dLbCpf1. The term “dLbCpf1: refers to mutated Cpf1 from Lachnospiraceae bacterium ND2006 (LbCpf1) that lacks DNAse activity. In aspects, dLbCpf1 includes a D832A mutation. In spects, the dLbCpf1 has substantially no detectable endonuclease (e.g., endodeoxyribo-nuclease) activity. In aspects, dLbCpf1 includes the amino acid sequence of SEQ ID NO:3. In aspects, dLbCpf1 has the amino acid sequence of SEQ ID NO:3. In aspects, dLbCpf1 has an amino acid sequence that has at least 50%, 55%, 60%, 65%, 70%, 75%, 80%, 85%, 90%, 91%, 92%, 93%, 94%, 95%, 96%, 97%, 98%, 99% or 100% sequence identity to SEQ ID NO:3. In aspects, dLbCpf1 has an amino acid sequence that has at least 75% sequence identity to SEQ ID NO:3. In aspects, dLbCpf1 has an amino acid sequence that has at least 80% sequence identity to SEQ ID NO:3. In aspects, dLbCpf1 has an amino acid sequence that has at least 85% sequence identity to SEQ ID NO:3. In aspects, dLbCpf1 has an amino acid sequence that has at least 90% sequence identity to SEQ ID NO:3. In aspects, dLbCpf1 has an amino acid sequence that has at least 95% sequence identity to SEQ ID NO:3.

(SEQ ID NO: 3)
MSKLEKFTNCYSLSKTLRFKAIPVGKTQENIDNKRLLVEDEKRAEDYKGV
KKLLDRYYLSFINDVLHSIKLKNLNNYISLFRKKTRTEKENKELENLEIN
LRKEIAKAFKGNEGYKSLFKKDIIETILPEFLDDKDEIALVNSFNGFTTA
FTGFFDNRENMFSEEAKSTSIAFRCINENLTRYISNMDIFEKVDAIFDKH
EVQEIKEKILNSDYDVEDFFEGEFFNFVLTQEGIDVYNAIIGGFVTESGE
KIKGLNEYINLYNQKTKQKLPKFKPLYKQVLSDRESLSFYGEGYTSDEEV
LEVFRNTLNKNSEIFSSIKKLEKLFKNFDEYSSAGIFVKNGPAISTISKD
IFGEWNVIRDKWNAEYDDIHLKKKAVVTEKYEDDRRKSFKKIGSFSLEQL
QEYADADLSVVEKLKEIIIQKVDEIYKVYGSSEKLFDADFVLEKSLKKND
AVVAIMKDLLDSVKSFENYIKAFFGEGKETNRDESFYGDFVLAYDILLKV
DHIYDAIRNYVTQKPYSKDKFKLYFQNPQFMGGWDKDKETDYRATILRYG
SKYYLAIMDKKYAKCLQKIDKDDVNGNYEKINYKLLPGPNKMLPKVFFSK
KWMAYYNPSEDIQKIYKNGTFKKGDMFNLNDCHKLIDFFKDSISRYPKWS
NAYDFNFSETEKYKDIAGFYREVEEQGYKVSFESASKKEVDKLVEEGKLY
MFQIYNKDFSDKSHGTPNLHTMYFKLLFDENNHGQIRLSGGAELFMRRAS
LKKEELVVHPANSPIANKNPDNPKKTTTLSYDVYKDKRFSEDQYELHIPI
AINKCPKNIFKINTEVRVLLKHDDNPYVIGIARGERNLLYIVVVDGKGNI
VEQYSLNEIINNFNGIRIKTDYHSLLDKKEKERFEARQNWTSIENIKELK
AGYISQVVHKICELVEKYDAVIALADLNSGFKNSRVKVEKQVYQKFEKML
IDKLNYMVDKKSNPCATGGALKGYQITNKFESFKSMSTQNGFIFYIPAWL
TSKIDPSTGFVNLLKTKYTSIADSKKFISSFDRIMYVPEEDLFEFALDYK
NFSRTDADYIKKWKLYSYGNRIRIFRNPKKNNVFDWEEVCLTSAYKELFN
KYGINYQQGDIRALLCEQSDKAFYSSFMALMSLMLQMRNSITGRTDVDFL
ISPVKNSDGIFYDSRNYEAQENAILPKNADANGAYNIARKVLWAIGQFKK
AEDEKLDKVKIAISNKEWLEYAQTSVKH

[0038] In embodiments, the nuclease-deficient RNA-guided DNA endonuclease enzyme is dFnCpf1. The term “dFnCpf1” refers to mutated Cpf1 from Francisella novicida UI 12 (FnCpf1) that lacks DNAse activity. In aspects, dFnCpf1 includes a D917 A mutation. In aspects, the dFnCpf1 has substantially no detectable endonuclease (e.g., endodeoxyribo-nuclease) activity. In aspects, dFnCpf1 includes the amino acid sequence of SEQ ID NO: 4. In aspects, dFnCpf1 has the amino acid sequence of SEQ ID NO: 4. In aspects, dFnCpf1 has an amino acid sequence that has at least 50%, 55%, 60%, 65%, 70%, 75%, 80%, 85%, 90%, 91%, 92%, 93%, 94%, 95%, 96%, 97%, 98%, 99% or 100% sequence identity to SEQ ID NO:4. In aspects, dFnCpf1 has an amino acid sequence that has at least 75% sequence identity to SEQ ID NO:4. In aspects, dFnCpf1 has an amino acid sequence that has at least 80% sequence identity to SEQ ID NO:4. In aspects, dFnCpf1 has an amino acid sequence that has at least 85% sequence identity to SEQ ID NO:4. In aspects, dFnCpf1 has an amino acid sequence that has at least 90% sequence identity to SEQ ID NO:4. In aspects, dFnCpf1 has an amino acid sequence that has at least 95% sequence identity to SEQ ID NO:4.

(SEQ ID NO: 4)
MYPYDVPDYASGSGMSIYQEFVNKYSLSKTLRFELIPQGKTLENIKARGL
ILDDEKRAKDYKKAKQIIDKYHQFFIEEILSSVCISEDLLQNYSDVYFKL
KKSDDDNLQKDFKSAKDTIKKQISEYIKDSEKFKNLFNQNLIDAKKGQES
DLILWLKQSKDNGIELFKANSDITDIDEALEIIKSFKGWTTYFKGFHENR
KNVYSSNDIPTSIIYRIVDDNLPKFLENKAKYESLKDKAPEAINYEQIKK
DLAEELTFDIDYKTSEVNQRVESLDEVFEIANFNNYLNQSGITKFNTIIG
GKFVNGENTKRKGINEYINLYSQQINDKTLKKYKMSVLFKQILSDTESKS
FVIDKLEDDSDVVTTMQSFYEQIAAFKTVEEKSIKETLSLLFDDLKAQKL
DLSKIYFKNDKSLTDLSQQVFDDYSVIGTAVLEYITQQIAPKNLDNPSKK
EQELIAKKTEKAKYLSLETIKLALEEFNKHRDIDKQCRFEEILANFAAIP
MIFDEIAQNKDNLAQISIKYQNQGKKDLLQASAEDDVKAIKDLLDQTNNL
LHKLKIFHISQSEDKANILDKDEHFYLVFEECYFELANIVPLYNKIRNYI
TQKPYSDEKFKLNFENSTLANGWDKNKEPDNTAILFIKDDKYYLGVMNKK
NNKIFDDKAIKENKGEGYKKIVYKLLPGANKMLPKVFFSAKSIKFYNPSE
DILRIRNHSTHTKNGSPQKGYEKFEFNIEDCRKFIDFYKQSISKHPEWKD
FGFRFSDTQRYNSIDEFYREVENQGYKLTFENISESYIDSVVNQGKLYLF
QIYNKDFSAYSKGRPNLHTLYWKALFDERNLQDVVYKLNGEAELFYRKQS
IPKKITHPAKEAIANKNKDNPKKESVFEYDLIKDKRFTEDKFFFHCPITI
NFKSSGANKFNDEINLLLKEKANDVHILSIARGERHLAYYTLVDGKGNII
KQDTFNIIGNDRMKTNYHDKLAAIEKDRDSARKDWKKINNIKEMKEGYLS
QVVHEIAKLVIEYNAIVVFEDLNFGFKRGRFKVEKQVYQKLEKMLIEKLN
YLVFKDNEFDKTGGVLRAYQLTAPFETFKKMGKQTGIIYYVPAGFTSKIC
PVTGFVNQLYPKYESVSKSQEFFSKFDKICYNLDKGYFEFSFDYKNFGDK
AAKGKWTIASFGSRLINFRNSDKNHNWDTREVYPTKELEKLLKDYSIEYG
HGECIKAAICGESDKKFFAKLTSVLNTILQMRNSKTGTELDYLISPVADV
NGNFFDSRQAPKNMPQDADANGAYHIGLKGLMLLGRIKNNQEGKKLNLVI
KNEEYFEFVQNRNN

[0039] A “Cpf1” or “Cpf1 protein” as referred to herein includes any of the recombinant or naturally-occurring forms of the Cpf1 (CRISPR from Prevotella and Francisella 1) endonuclease or variants or homologs thereof that maintain Cpf1 endonuclease enzyme activity (e.g. within at least 50%, 80%, 90%, 95%, 96%, 97%, 98%, 99% or 100% activity compared to Cpf1). In aspects, the variants or homologs have at least 90%, 95%, 96%, 97%, 98%, 99% or 100% amino acid sequence identity across the whole sequence or a portion of the sequence (e.g. a 50, 100, 150 or 200 continuous amino acid portion) compared to a naturally occurring Cpf1 protein. In aspects, the Cpf1 protein is substantially identical to the protein identified by the UniProt reference number U2UMQ6 or a variant or homolog having substantial identity thereto. In aspects, the Cpf1 protein is identical to the protein identified by the UniProt reference number U2UMQ6. In aspects, the Cpf1 protein has at least 75% sequence identity to the amino acid sequence of the protein identified by the UniProt reference number U2UMQ6. In aspects, the Cpf1 protein has at least 80% sequence identity to the amino acid sequence of the protein identified by the UniProt reference number U2UMQ6. In aspects, the Cpf1 protein is identical to the protein identified by the UniProt reference number U2UMQ6. In aspects, the Cpf1 protein has at least 85% sequence identity to the amino acid sequence of the protein identified by the UniProt reference number U2UMQ6. In aspects, the Cpf1 protein is identical to the protein identified by the UniProt reference number U2UMQ6. In aspects, the Cpf1 protein has at least 90% sequence identity to the amino acid sequence of the protein identified by the UniProt reference number U2UMQ6. In aspects, the Cpf1 protein is identical to the protein identified by the UniProt reference number U2UMQ6. In aspects, the Cpf1 protein has at least 95% sequence identity to the amino acid sequence of the protein identified by the UniProt reference number U2UMQ6.

[0040] In embodiments, the nuclease-deficient RNA-guided DNA endonuclease enzyme is a nuclease-deficient Cas9 variant. The term “nuclease-deficient Cas9 variant” refers to a Cas9 protein having one or more mutations that increase its binding specificity to PAM compared to wild type Cas9 and further include mutations that render the protein incapable of or having severely impaired endonuclease activity. Without wishing to be bound by theory, it is believed that the target sequence should be associated with a PAM (protospacer adjacent motif); that is, a short sequence recognized by the CRISPR complex. The precise sequence and length requirements for the PAM differ depending on the CRISPR enzyme used, but P AMs are typically 2-5 base pair sequences adjacent the protospacer (that is, the target sequence). The binding specificity of nuclease-deficient Cas9 variants to PAM can be determined by any method known in the art. Descriptions and uses of known Cas9 variants may be found, for example, in Shmakov et al., Diversity and evolution of class 2 CRISPR-Cas systems. Nat. Rev. Microbiol. 15, 2017 and Cebrian-Serrano et al, CRISPR-Cas orthologues and variants: optimizing the repertoire, specificity and delivery of genome engineering tools. Mamm. Genome 7-8. 2017. Exemplary Cas9 variants are listed in the Table 1 below.

TABLE 1

| Cas9 Variants | PAM domains | References |
|---|---|---|
| Strep pyogenes (Sp) | NGG | Hsu et al. 2014 Cell |
| Cas9 | | |
| Staph aureus (Sa) Cas9 | NNGRRT or NNGRR | Ran et al. 2015 Nature |
| | NNGGGT, NNGAAT, | |
| | NNGAGT (Zetsche) | |
| SpCas9 VQR mutant | NGAG > NGAT = | Kleinstiver et al. 2015 |
| (D1135V, R1335Q, | NGAA > NGAC | Nature |
| T1337R) | NGCG | |
| SpCas9 VRER mutant | NGCG | Kleinstiver et al. 2015 |
| (D1135V/G1218R/ | | Nature |
| R1335E/T1337R) | | |
| SpCas9 D1135E | NGG, greater fidelity, | Kleinstiver et al. 2015 |
| | less cutting at NAG | Nature |
| | and NGA sites | |
| eSpCas9 1.1 mutant | NGG | Slaymaker et al. |
| (K848A/K1003A/ | | Science 2015 |
| R1060A) | | |
| SpCas9 HFl | NGG | Kleinstiver et al. 2016 |
| (Q695A, Q926A, | | Nature |
| N497A, R661A) | | |
| AsCpfl | TTTN (5′ of sgRNA) | Zetsche et al. 2015 |
| HypaCas9 (N692A, | | Cell Chen et al., |
| M694A, Q695A, | | Nature volume 550, |
| H698A) | | pages 407-410 (19 |
| | | Oct. 2017) |

[0041] General methods in molecular and cellular biochemistry can be found in such standard textbooks as Molecular Cloning: A Laboratory Manual, 3rd Ed. (Sambrook et al., HaRBor Laboratory Press 2001); Short Protocols in Molecular Biology, 4th Ed. (Ausubel et al. eds., John Wiley & Sons 1999); Protein Methods (Bollag et al., John Wiley & Sons 1996); Nonviral Vectors for Gene Therapy (Wagner et al. eds., Academic Press 1999); Viral Vectors (Kaplift & Loewy eds., Academic Press 1995); Immunology Methods Manual (I. Lefkovits ed., Academic Press 1997); and Cell and Tissue Culture: Laboratory Procedures in Biotechnology (Doyle & Griffiths, John Wiley & Sons 1998), the disclosures of which are incorporated herein by reference.

[0042] Before the present invention is further described, it is to be understood that this invention is not limited to particular embodiments described, as such may, of course, vary. It is also to be understood that the terminology used herein is for the purpose of describing particular embodiments only, and is not intended to be limiting, since the scope of the present invention will be limited only by the appended claims.

[0043] Where a range of values is provided, it is understood that each intervening value, to the tenth of the unit of the lower limit unless the context clearly dictates otherwise, between the upper and lower limit of that range and any other stated or intervening value in that stated range, is encompassed within the invention. The upper and lower limits of these smaller ranges may independently be included in the smaller ranges, and are also encompassed within the invention, subject to any specifically excluded limit in the stated range. Where the stated range includes one or both of the limits, ranges excluding either or both of those included limits are also included in the invention.

[0044] Unless defined otherwise, all technical and scientific terms used herein have the same meaning as commonly understood by one of ordinary skill in the art to which this invention belongs. Although any methods and materials similar or equivalent to those described herein can also be used in the practice or testing of the present invention, the preferred methods and materials are now described. All publications mentioned herein are incorporated herein by reference to disclose and describe the methods and/or materials in connection with which the publications are cited.

[0045] It must be noted that as used herein and in the appended claims, the singular forms “a,” “an,” and “the” include plural referents unless the context clearly dictates otherwise. Thus, for example, reference to “a nuclease-deficient CRISPR/Cas effector polypeptide” includes a plurality of such a nuclease-deficient CRISPR/Cas effector polypeptides and reference to “the guide nucleic acid” includes reference to one or more guide nucleic acid and equivalents thereof known to those skilled in the art, and so forth. It is further noted that the claims may be drafted to exclude any optional element. As such, this statement is intended to serve as antecedent basis for use of such exclusive terminology as “solely,” “only” and the like in connection with the recitation of claim elements, or use of a “negative” limitation.

[0046] It is appreciated that certain features of the invention, which are, for clarity, described in the context of separate embodiments, may also be provided in combination in a single embodiment. Conversely, various features of the invention, which are, for brevity, described in the context of a single embodiment, may also be provided separately or in any suitable sub-combination. All combinations of the embodiments pertaining to the invention are specifically embraced by the present invention and are disclosed herein just as if each and every combination was individually and explicitly disclosed. In addition, all sub-combinations of the various embodiments and elements thereof are also specifically embraced by the present invention and are disclosed herein just as if each and every such sub-combination was individually and explicitly disclosed herein.

[0047] The publications discussed herein are provided solely for their disclosure prior to the filing date of the present application. Nothing herein is to be construed as an admission that the present invention is not entitled to antedate such publication by virtue of prior invention. Further, the dates of publication provided may be different from the actual publication dates which may need to be independently confirmed.

### DETAILED DESCRIPTION

[0048] The present disclosure provides methods for determining that a candidate polypeptide in a library of polypeptides has editing activity comprising expressing in a plurality of cells: a library of first expression cassettes each comprising a nucleic acid encoding a polypeptide wherein each polypeptide in the library comprises, in order, a first editing domain, a first linker, a nuclease-deficient RNA guided endonuclease domain, a second linker, and a second editing domain; and a second expression cassette comprising a nucleic acid encoding a guide RNA directed to a target of interest, wherein said first and second expression cassettes are expressed in the plurality of cells; separating the plurality of cells based on the expression level of the target of interest; extracting genomic DNA (gDNA) from the plurality of cells; and sequencing the gDNA of cells that have a high level expression or a low level of expression of the target of interest thereby determining that the candidate polypeptide has epigenetic editing activity. In some embodiments, the polypeptide comprises a third editing domain. In some embodiments, the polypeptide comprises a fourth editing domain. The present disclosure also provided libraries containing the first expression cassettes of the present disclosure.

Methods for Determining that a Candidate Polypeptide in a Library of Polypeptide has Editing Activity

[0049] The present disclosure provides methods for determining that a candidate polypeptide in a library of polypeptides has editing activity comprising expressing in a plurality of cells: a library of first expression cassettes each comprising a nucleic acid encoding a polypeptide wherein each polypeptide in the library comprises, in order, a first editing domain, a first linker, a nuclease-deficient RNA guided endonuclease domain, a second linker, and a second editing domain; and a second expression cassette comprising a nucleic acid encoding a guide RNA directed to a target of interest, wherein said first and second expression cassettes are expressed in the plurality of cells; separating the plurality of cells based on the expression level of the target of interest; extracting genomic DNA (gDNA) from the plurality of cells; and sequencing the gDNA of cells that have a high level expression or a low level of expression of the target of interest thereby determining that the candidate polypeptide has editing activity. In some embodiments, the polypeptide comprises a third editing domain. In some embodiments, the polypeptide comprises a fourth editing domain.

[0050] The methods of the present disclosure comprise expressing a first and second expression cassette in a cell. In general, the expression involves introducing an expression cassette into a host cell. Methods of introducing a nucleic acid into a host cell are known in the art, and any convenient method can be used to introduce a subject nucleic acid (e.g., an expression construct/vector) into a target cell (e.g., prokaryotic cell, eukaryotic cell, plant cell, animal cell, mammalian cell, human cell, and the like). Suitable methods include, e.g., viral infection, transfection, conjugation, protoplast fusion, lipofection, electroporation, calcium phosphate precipitation, polyethyleneimine (PEI)-mediated transfection, DEAE-dextran mediated transfection, liposome-mediated transfection, particle gun technology, calcium phosphate precipitation, direct microinjection, nanoparticle-mediated nucleic acid delivery (see, e.g., Panyam et al. Adv Drug Deliv Rev. 2012 Sep. 13. pii: S0169-409X(12)00283-9. doi: 10.1016/j.addr.2012.09.023), and the like.

[0051] The methods disclosed herein comprise expressing a first and a second expression cassette in a plurality of cells. The plurality of cells may be any cell of interest. Cells that find use in the present disclosure include, without limitation, mammalian cells, plant cells, insect cells, eukaryotic cells, yeast cells, bacterial cells, fungal cells, etc.

[0052] The library utilized in the methods of the present application comprise a collection of first expression cassettes each comprising a nucleic acid encoding a polypeptide. In some embodiments, the nucleic acid in the first expression cassette is operably linked to a promoter. The promoter may be any promoter described below. In some embodiments, the first expression cassette does not comprise a nucleic acid encoding a barcode sequence.

[0053] The libraries of the present disclosure contain a large number of unique polypeptides. The number of unique polypeptides in the libraries include greater than 500, greater than 1000, greater than 1500, greater than 2000, greater than 3000, greater than 4000, greater than 5000, greater than 6000, greater than 7000, greater than 8000, greater than 9000, greater than 10000, greater than 20000, greater than 30000, greater than 40000, greater than 50000, greater than 60000, greater than 70000, greater than 80000, greater than 90000, or greater than 100000 unique polypeptides.

[0054] The polypeptides of the present application comprise a first editing domain, a first linker, a nuclease-deficient RNA guided endonuclease domain, a second linker, and a second editing domain. In some embodiments, the editing domain is the enzymatic domain of a polypeptide related to epigenetic modifications. Epigenetic modifications may be a specific modification of DNA (e.g. genomic DNA) or may be modification of amino acids present in histones. Epigenetic modifications of DNA include, without limitation, methylation, demethylation, deamination, etc. Epigenetic modifications of histones include, without limitation, acetylation, deacetylation, ubiquitination, deubiquitination, sumoylation, desumolyation, ADP-Ribosylation, phosphorylation, etc. In some embodiments, the epigenetic modification is modification of DNA. In some embodiments, the epigenetic modification is modification of histones. The editing domain may be any enzymatic domain of a polypeptide associated with epigenetic modification. The editing domain may also be a truncation or a modified variant of any enzymatic domain of a polypeptide associated with epigenetic modification. Polypeptides involved in epigenetic modification are known in the art and have been described in, for example, Medvedeva et al. (Database (Oxford). 2015 Jul. 7; 2015:bav067) which is specifically incorporated by reference herein. In some embodiments, the first and second editing domain is an enzymatic domain selected from any of the polypeptides listed in table 2. In some embodiments, the first and second editing domain is selected from any of the polypeptides encoded by the nucleic acids listed in table 4. In some embodiments, the first and second editing domains are different from each other. In some embodiments, the first and second editing domains are the same as each other.

TABLE 2
Polypeptides associated with epigenetic modification

| | | | | | | | |
|---|---|---|---|---|---|---|---|
| A1CF | CBX5 | EID2 | IKZF3 | MORF4L2 | PRDM1 | SETD1A | TEX10 |
| ACINU | CBX6 | EID2B | ING1 | MOV10 | PRDM11 | SETD1B | TFDP1 |
| ACTB | CBX7 | EIF4A3 | ING2 | MPHOSPH8 | PRDM12 | SETD2 | TFPT |
| ACTL6A | CBX8 | ELP2 | ING3 | MPND | PRDM13 | SETD3 | THRAP3 |
| ACTL6B | CCDC101 | ELP3 | ING4 | MRGBP | PRDM14 | SETD5 | TLE1 |
| ACTR3B | CDC6 | ELP4 | ING5 | MSH6 | PRDM16 | SETD6 | TLE2 |
| ACTR5 | CDC73 | ELP5 | INO80 | MSL1 | PRDM2 | SETD7 | TLE4 |
| ACTR6 | CDK1 | ELP6 | INO80B | MSL2 | PRDM4 | SETD8 | TLK1 |
| ACTR8 | CDK17 | ENY2 | INO80C | MSL3 | PRDM5 | SETDB1 | TLK2 |
| ADNP | CDK2 | EP300 | INO80D | MST1 | PRDM6 | SETDB2 | TNP1 |
| AEBP2 | CDK3 | EP400 | INO80E | MTA1 | PRDM7 | SETMAR | TNP2 |
| AICDA | CDK5 | EPC1 | JADE1 | MTA2 | PRDM8 | SF3B1 | TONSL |
| AIRE | CDK7 | EPC2 | JADE2 | MTA3 | PRDM9 | SF3B3 | TOP2A |
| ALKBH1 | CDK9 | ERBB4 | JADE3 | MTF2 | PRKAA1 | SFMBT1 | TOP2B |
| ALKBH1 | CDY1 | ERCC6 | JAK2 | MUM1 | PRKAA2 | SFMBT2 | TP53 |
| ALKBH4 | CDY1B | EXOSC1 | JARID2 | MYBBP1A | PRKAB1 | SFPQ | TP53BP1 |
| ALKBH5 | CDY2A | EXOSC2 | JDP2 | MYO1C | PRKAB2 | SFSWAP | TRA2B |
| ANKRD32 | CDY2B | EXOSC3 | JMJD1C | MYSM1 | PRKAG1 | SHPRH | TRIM16 |
| ANP32A | CDYL | EXOSC4 | JMJD6 | NAA60 | PRKAG2 | SIN3A | TRIM24 |
| ANP32B | CDYL2 | EXOSC5 | KANSL1 | NAP1L1 | PRKAG3 | SIN3B | TRIM27 |
| ANP32E | CECR2 | EXOSC6 | KANSL2 | NAP1L2 | PRKCA | SIRT1 | TRIM28 |
| APBB1 | CELF1 | EXOSC7 | KANSL3 | NAP1L4 | PRKCB | SIRT2 | TRIM33 |
| APEX1 | CELF2 | EXOSC8 | KAT2A | NASP | PRKCD | SIRT6 | TRRAP |
| APOBEC1 | CELF3 | EXOSC9 | KAT2B | NAT10 | PRKDC | SIRT7 | TRUB2 |
| APOBEC2 | CELF4 | EYA1 | KAT5 | NAT10 | PRMT1 | SKP1 | TSSK6 |
| APOBEC3A | CELF5 | EYA2 | KAT6A | NBN | PRMT2 | SLU7 | TTK |
| APOBEC3B | CELF6 | EYA3 | KAT6B | NCL | PRMT5 | SMARCA1 | TYW5 |
| APOBEC3C | CENPC | EYA4 | KAT7 | NCOA1 | PRMT6 | SMARCA2 | U2AF2 |
| APOBEC3D | CHAF1A | EZH1 | KAT8 | NCOA2 | PRMT7 | SMARCA4 | UBE2A |
| APOBEC3F | CHAF1B | EZH2 | KDM1A | NCOA3 | PRMT8 | SMARCA5 | UBE2B |
| APOBEC3G | CHD1 | FAM175A | KDM1B | NCOA6 | PRMT9 | SMARCAD1 | UBE2D1 |
| APOBEC3H | CHD1L | FAM175B | KDM2A | NCOR1 | PRPF31 | SMARCAL1 | UBE2D3 |
| ARID1A | CHD2 | FBL | KDM2B | NCOR2 | PRR14 | SMARCB1 | UBE2E1 |
| ARID1B | CHD3 | FBRS | KDM3A | NEK6 | PSIP1 | SMARCC1 | UBE2H |
| ARID2 | CHD4 | FBRSL1 | KDM3B | NEK9 | PTBP1 | SMARCC2 | UBE2N |
| ARID4A | CHD5 | FOXA1 | KDM4A | NFRKB | PTBP1 | SMARCD1 | UBE2T |
| ARID4B | CHD6 | FOXO1 | KDM4B | NFYB | PUF60 | SMARCD2 | UBN1 |
| ARNTL | CHD7 | FOXP1 | KDM4C | NFYC | RAD51 | SMARCD3 | UBR2 |
| ARRB1 | CHD8 | FOXP2 | KDM4D | NIPBL | RAD54B | SMARCE1 | UBR5 |
| ASF1A | CHD9 | FOXP3 | KDM4E | NOC2L | RAD54L | SMEK1 | UBR7 |
| ASF1B | CHEK1 | FOXP4 | KDM5A | NPAS2 | RAD54L2 | SMEK2 | UCHL5 |
| ASH1L | CHRAC1 | FTO | KDM5B | NPM1 | RAG1 | SMYD1 | UHRF1 |
| ASH2L | CHTOP | GADD45A | KDM5C | NPM2 | RAG2 | SMYD2 | UHRF2 |
| ASXL1 | CHUK | GADD45B | KDM5D | NSD1 | RAI1 | SMYD3 | UIMC1 |
| ASXL2 | CIR1 | GADD45G | KDM6A | NSL1 | RARA | SMYD4 | USP11 |
| ASXL3 | CIT | GATAD1 | KDM6B | NSRP1 | RB1 | SNAI2 | USP12 |
| ATAD2 | CLNS1A | GATAD2A | KDM7A | NSUN2 | RBBP4 | SP1 | USP15 |
| ATAD2B | CLOCK | GATAD2B | KDM8 | NSUN6 | RBBP5 | SP100 | USP16 |
| ATF2 | CRB2 | GFI1 | KEAP1 | NTMT1 | RBBP7 | SP140 | USP17L2 |
| ATF7IP | CREBBP | GFI1B | KHDRBS1 | NUP98 | RBFOX1 | SPEN | USP21 |
| ATM | CSNK2A1 | GLYR1 | KLF18 | OGT | RBM11 | SPOP | USP22 |
| ATN1 | CSRP2BP | GSE1 | KMT2A | OIP5 | RBM15 | SRCAP | USP3 |
| ATR | CTBP1 | GSG2 | KMT2B | PADI1 | RBM15B | SRRM4 | USP36 |
| ATRX | CTBP2 | GTF21 | KMT2C | PADI2 | RBM17 | SRSF1 | USP44 |
| ATXN7 | CTCF | GTF3C4 | KMT2D | PADI3 | RBM24 | SRSF10 | USP46 |
| ATXN7L3 | CTCFL | HAT1 | KMT2E | PADI4 | RBM25 | SRSF12 | USP49 |
| AURKA | CTR9 | HCFC1 | L3MBTL1 | PAF1 | RBM4 | SRSF3 | USP7 |
| AURKB | CUL1 | HCFC2 | L3MBTL2 | PAGR1 | RBM5 | SRSF6 | UTY |
| AURKC | CUL2 | HDAC1 | L3MBTL3 | PAK2 | RBM7 | SS18L1 | VDR |
| BABAM1 | CUL3 | HDAC10 | L3MBTL4 | PARG | RBM8A | SS18L2 | VIRMA |
| BAHD1 | CUL4A | HDAC11 | LAS1L | PARP1 | RBMY1A1 | SSRP1 | VPS72 |
| BANP | CUL4B | HDAC2 | LBR | PARP2 | RBX1 | STK4 | VRK1 |
| BAP1 | CUL5 | HDAC3 | LEO1 | PARP3 | RCC1 | SUDS3 | WAC |
| BARD1 | CXXC1 | HDAC4 | LRWD1 | PAXIP1 | RCOR1 | SUPT16H | WDR5 |
| BAZ1A | DAPK3 | HDAC5 | MAGOH | PBK | RCOR3 | SUPT3H | WDR77 |
| BAZ1B | DAXX | HDAC6 | MAP3K7 | PBRM1 | REST | SUPT6H | WDR82 |
| BAZ2A | DDB1 | HDAC7 | MAPKAPK3 | PCGF1 | RFOX1 | SUPT7L | WHSC1 |
| BAZ2B | DDB2 | HDAC8 | MASTL | PCGF2 | RING1 | SUV39H1 | WHSC1L1 |
| BCOR | DDX17 | HDAC9 | MAX | PCGF3 | RLIM | SUV39H2 | WSB2 |
| BCORL1 | DDX21 | HDGF | MAZ | PCGF5 | RMI1 | SUV420H1 | WTAP |
| BMI1 | DDX5 | HDGFL2 | MBD1 | PCGF6 | RNF168 | SUV420H2 | YAF2 |
| BPTF | DDX50 | HELLS | MBD2 | PCNA | RNF2 | SUZ12 | YEATS2 |
| BRCA1 | DEK | HIF1AN | MBD3 | PDP1 | RNF20 | SYNCRIP | YEATS4 |
| BRCA2 | DHX9 | HINFP | MBD4 | PELP1 | RNF40 | TADA1 | YTHDC1 |
| BRCC3 | DMAP1 | HIRA | MBD5 | PHC1 | RNF8 | TADA2A | YWHAB |
| BRD1 | DNAJC1 | HIRIP3 | MBD6 | PHC2 | RNPS1 | TADA2B | YWHAE |
| BRD2 | DNAJC2 | HJURP | MBIP | PHC3 | RPS6KA3 | TADA3 | YWHAZ |
| BRD3 | DND1 | HLCS | MBNL1 | PHF1 | RPS6KA4 | TAF1 | YY1 |
| BRD4 | DNMT1 | HLTF | MBNL3 | PHF10 | RPS6KA5 | TAF10 | ZBTB16 |
| BRD7 | DNMT3A | HMG20A | MBTD1 | PHF12 | RPUSD3 | TAF12 | ZBTB33 |
| BRD8 | DNMT3B | HMG20B | MCRS1 | PHF13 | RRP8 | TAF1L | ZBTB7A |
| BRD9 | DNMT3L | HMGB1 | MDC1 | PHF14 | RSF1 | TAF2 | ZBTB7C |
| BRDT | DNTTIP2 | HMGN1 | MEAF6 | PHF19 | RSRC1 | TAF3 | ZC3H13 |
| BRE | DOT1L | HMGN2 | MECP2 | PHF2 | RUVBL1 | TAF4 | ZCWPW1 |
| BRMS1 | DPF1 | HMGN3 | MEN1 | PHF20 | RUVBL2 | TAF5 | ZFP57 |
| BRMS1L | DPF2 | HMGN4 | METTL11B | PHF20L1 | RYBP | TAF5L | ZGPAT |
| BRPF1 | DPF3 | HMGN5 | METTL14 | PHF21A | SAFB | TAF6 | ZHX1 |
| BRPF3 | DPPA3 | HNRNPU | METTL16 | PHF8 | SAP130 | TAF6L | ZMYM2 |
| BRWD1 | DPY30 | HNRPL | METTL21A | PHIP | SAP18 | TAF7 | ZMYM3 |
| BRWD3 | DR1 | HNRPM | METTL3 | PIWIL4 | SAP25 | TAF8 | ZMYND11 |
| BUB1 | DTX3L | HP1BP3 | METTL4 | PKM | SAP30 | TAF9 | ZMYND8 |
| C11orf30 | DZIP3 | HR | MGA | PKN1 | SAP30L | TAF9B | ZNF217 |
| C14orf169 | E2F6 | HSFX3 | MGEA5 | POGZ | SATB1 | TBL1XR1 | ZNF516 |
| C17orf49 | EED | HSPA1A | MINA | POLE3 | SATB2 | TDG | ZNF532 |
| CARM1 | EEF1AKMT3 | HSPA1A | MIS18A | PPARGC1A | SCMH1 | TDRD3 | ZNF541 |
| CBLL1 | EEF1AKMT4 | HSPA1B | MIS18BP1 | PPM1G | SCML2 | TDRD7 | ZNF592 |
| CBX1 | EEF1AKNMT | HSPA1B | MLLT1 | PPP2CA | SCML4 | TDRKH | ZNF687 |
| CBX2 | EHMT1 | HUWE1 | MLLT10 | PPP4C | SENP1 | TET1 | ZNF711 |
| CBX3 | EHMT2 | IKBKAP | MLLT6 | PPP4R2 | SENP3 | TET2 | ZNHIT1 |
| CBX4 | EID1 | IKZF1 | MORF4L1 | PQBP1 | SET | TET3 | ZRANB3 |

[0055] In some embodiments, the editing domain is a transcriptional editing domain. The transcriptional editing domain may be a transcriptional editing domain that enhances transcription or represses transcription. The transcriptional editing domain may be any transcriptional editing domain deemed useful. Transcriptional editing domains include, without limitation, VP64, KRAB, VP16, MeCP2, HSF1, etc. In some embodiments, the transcriptional editing domain is a transcriptional editing domain found in Table 4.

[0056] In some embodiments, the first or second editing domain is a nanobody or scFv. Domains that are nanbodies or scFvs are known in the art and have been described by, for example, Van et al. (Nat Commun. 2021 Jan. 22; 12(1):537) which is specifically incorporated by reference herein.

[0057] The polypeptides of the present disclosure comprise a nuclease-deficient RNA guided endonuclease domain. The nuclease-deficient RNA guided endonucleasc domain utilized in the methods disclosed herein is any nuclease-deficient RNA guided endonuclease domain that is able to bind to specific genomic site without cleaving said genomic site. In some embodiments, the nuclease-deficient RNA guided endonuclease domain is a nuclease-deficient CRISPR/Cas effector polypeptide. In some embodiments, the CRISPR/Cas effector polypeptide is a class 2 nuclease-deficient CRISPR/Cas effector polypeptide. Class 2 nuclease-deficient CRISPR/Cas effector polypeptides include, without limitation, type II, type V, type VI nuclease-deficient CRISPR/Cas effector polypeptides, etc. Type II nuclease-deficient CRISPR/Cas effector polypeptides include, without limitation, nuclease-deficient Cas9 (e.g. dCas9), etc. Type V nuclease-deficient CRISPR/Cas effector polypeptides include, without limitation, nuclease-deficient Cpf1 (e.g. dCas12a), nuclease-deficient C2c1, nuclease-deficient C2c3, etc. Type VI nuclease-deficient CRISPR/Cas effector polypeptides include, without limitation, nuclease-deficient C2c2 (e.g. dCas13a), etc. In a preferred embodiment, the class 2 nuclease-deficient CRISPR/Cas effector polypeptide is a CRISPR/dCas9 effector polypeptide. In some embodiments, the CRISPR/dCas9 effector polypeptide further comprises further modification that alter PAM site specificity such as those disclosed in Table 1. In some embodiments, the class 2 nuclease-deficient CRISPR/Cas effector polypeptide is a CRISPR/dCas12 effector polypeptide.

[0058] In some embodiments, in place of the nuclease-deficient RNA guided endonuclease domain, a naturally DNase-free CRISPR enzyme domain. Any naturally DNase-free CRISPR enzyme domain may be used. In some embodiments, the naturally DNase-free CRISPR enzyme domain is a Cas12c enzyme domain. Cas12c enzyme domains are known in the art and have been described by, for example, Huang et al. (Mol Cell. 2022 Jun. 2; 82(11):2148-2160.e4) which is incorporated by reference herein.

[0059] In some embodiments, a DNA binding domain is used in place of a nuclease-deficient RNA guided endonuclease domain. The DNA binding domain may be any DNA binding domain deemed useful. DNA binding domains that find use in the present disclosure include, without limitation, transcription activator-like effector (TALE), zinc finger DNA binding domain, etc. TALE is known in the art and has been described in, for example, Becker et al. (Gene Genome Ed. 2021; 2:100007) which is specifically incorporated by reference herein. Zinc finger binding domains are known in the art and have been described by, for example, Kim et al. (Mol Cells. 2017 Aug. 31; 40(8): 533-54), which is specifically incorporated by reference herein. In some embodiments, when a DNA binding domain is used in place of a nuclease-deficient RNA guided endonuclease domain, the method does not comprise the second expression cassette.

[0060] The polypeptides of the present disclosure comprise a first and second linker. The linker may be any linker deemed useful. In some embodiments, the peptide linker has 2, 3, 4, 5, 6, 7, 8, 9, 10, 11, 12, 13, 14, 15, 16, 17, 18, 19, 20 or greater than 20 amino acids. In some embodiments, the peptide linker is between 1 to 5, 1 to 10, 1 to 15, 1 to 20, 5 to 10, 5 to 15 or 5 to 20 amino acids in length. Exemplary linkers include linear peptides having at least two amino acid residues such as Gly-Gly, Gly-Ala-Gly, Gly-Pro-Ala, Gly-Gly-Gly-Gly-Ser (SEQ ID NO: 5). Suitable linear peptides include poly glycine, polyserine, polyproline, polyalanine and oligopeptides consisting of alanyl and/or serinyl and/or prolinyl and/or glycyl amino acid residues. In some embodiments, the peptide linker has the amino acid sequence selected from the group consisting of Gly₉ (SEQ ID NO: 6), Glug (SEQ ID NO: 7), Serg (SEQ ID NO: 8), Gly₅-Cys-Pro2-Cys (SEQ ID NO: 9), (Gly₄-Ser)₃ (SEQ ID NO: 10), Ser-Cys-Val-Pro-Leu-Met-Arg-Cys-Gly-Gly-Cys-Cys-Asn (SEQ ID NO: 11), Pro-Ser-Cys-Val-Pro-Leu-Met-Arg-Cys-Gly-Gly-Cys-Cys-Asn (SEQ ID NO: 12), Gly-Asp-Leu-Ile-Tyr-Arg-Asn-Gln-Lys (SEQ ID NO: 13), and Gly₉-Pro-Ser-Cys-Val-Pro-Leu-Met-Arg-Cys-Gly-Gly-Cys-Cys-Asn (SEQ ID NO: 14). In some embodiment, the linker is a Gly-Thr-Gly-Ala (SEQ ID NO: 15) linker. The linker may be an XTEN linker such as the XTEN linkers described in U.S. Pat. No. 11,434,491, specifically incorporated by reference herein.

[0061] The methods of the present disclosure comprise expressing a second expression cassette in a cell. The second expression cassette comprises a nucleic acid encoding a guide RNA directed to a target of interest. The target of interest may be any target of interest deemed useful. In some embodiments, the guide RNA is a single guide RNA. In some embodiments, the nucleic acid in the second expression is operably linked to a promoter.

[0062] The expression cassette of the present disclosure may comprise any promoter deemed useful. In some cases, the promoter is a constitutively active promoter. In some cases, the promoter is a regulatable promoter. In some cases, the promoter is an inducible promoter. In some cases, the promoter is a tissue-specific promoter. In some cases, the promoter is a cell type-specific promoter.

[0063] Non-limiting examples of eukaryotic promoters (promoters functional in a eukaryotic cell) include EF1α, those from cytomegalovirus (CMV) immediate early, herpes simplex virus (HSV) thymidine kinase, early and late SV40, long terminal repeats (LTRs) from retrovirus, and mouse metallothionein-I. Selection of the appropriate vector and promoter is well within the level of ordinary skill in the art. The expression vector may also contain a ribosome binding site for translation initiation and a transcription terminator. The expression vector may also include appropriate sequences for amplifying expression. The expression vector may also include nucleotide sequences encoding protein tags (e.g., 6×His tag, hemagglutinin tag, fluorescent protein, etc.) that can be fused to variant type V CRISPR/Cas effector polypeptide of the present disclosure, thus resulting in a fusion polypeptide.

[0064] In some cases, a nucleotide sequence encoding a variant type V CRISPR/Cas effector polypeptide of the present disclosure, or a fusion polypeptide of the present disclosure, is operably linked to an inducible promoter. In some cases, a nucleotide sequence encoding a variant type V CRISPR/Cas effector polypeptide of the present disclosure is operably linked to a constitutive promoter.

[0065] A promoter can be a constitutively active promoter (i.e., a promoter that is constitutively in an active/“ON” state), it may be an inducible promoter (i.e., a promoter whose state, active/“ON” or inactive/“OFF”, is controlled by an external stimulus, e.g., the presence of a particular temperature, compound, or protein.), it may be a spatially restricted promoter (i.e., transcriptional control element, enhancer, etc.)(e.g., tissue specific promoter, cell type specific promoter, etc.), and it may be a temporally restricted promoter (i.e., the promoter is in the “ON” state or “OFF” state during specific stages of embryonic development or during specific stages of a biological process, e.g., hair follicle cycle in mice).

[0066] Suitable promoters can be derived from viruses and can therefore be referred to as viral promoters, or they can be derived from any organism, including prokaryotic or eukaryotic organisms. Suitable promoters can be used to drive expression by any RNA polymerase (e.g., pol I, pol II, pol III). Exemplary promoters include, but are not limited to the SV40 early promoter, mouse mammary tumor virus long terminal repeat (LTR) promoter; adenovirus major late promoter (Ad MLP); a herpes simplex virus (HSV) promoter, a cytomegalovirus (CMV) promoter such as the CMV immediate early promoter region (CMVIE), a rous sarcoma virus (RSV) promoter, a human U6 small nuclear promoter (U6) (Miyagishi et al., Nature Biotechnology 20. 497-500 (2002)), an enhanced U6 promoter (e.g., Xia et al., Nucleic Acids Res. 2003 Sep. 1; 31(17)), a human H1 promoter (H1), and the like.

[0067] The method of the present disclosure comprise separating the plurality of cells based on the expression level of the target of interest. The separating may be any separating deemed useful for the methods disclosed herein. In some embodiments, the separating comprising sorting the cells using a flow cytometer. In some embodiments, the separating comprises magnetically separating the cells. In some embodiments, the separating comprises the use of drug selection to remove undesired cells. In some embodiments, the target of interest is a gene. In some embodiments, the expression level refers to amount of gene product produced by the gene. In some embodiments, the gene product is a protein. In some embodiments, the plurality of cells are separated into groups that have a high level of expression or a low level of expression. High and low levels of expression are relative to the expression levels of the target of interest in the population as a whole. In some embodiments, cells that have high a level of expression are in the top 40% of the plurality of cells that have the highest level of expression and cells that have low expression are the bottom 40% of the plurality of cells that have the lowest expression. In some embodiments, cells that have high a level of expression are in the top 30% of the plurality of cells that have the highest level of expression and cells that have low expression are bottom 30% of the plurality of cells that have the lowest expression. In some embodiments, cells that have high a level of expression are in the top 25% of the plurality of cells that have the highest level of expression and cells that have low expression are the bottom 25% of the plurality of cells that have the lowest expression. In some embodiments, cells that have high a level of expression are in the top 15% of the plurality of cells that have the highest level of expression and cells that have low expression are bottom 15% of the plurality of cells that have the lowest expression. In some embodiments, cells that have high a level of expression are in the top 10% of the plurality of cells that have the highest level of expression and cells that have low expression are the bottom 10% of the plurality of cells that have the lowest expression.

[0068] The target of interest of the present disclosure may be any target of interest to which the editing is desired. In some embodiments, the target of interest is a gene. In some embodiments, the gene is operably linked to a sequence encoding a fluorescent protein. In some embodiments, the gene is not operably linked to a sequence encoding a fluorescent protein. In some embodiments, when the gene is not operably linked to a sequence encoding a fluorescent protein, the product of the gene, also known as the gene product, (e.g. a protein) may be labeled with an antibody conjugated to a fluorophore.

[0069] The method of the present disclosure comprise preforming a sequencing reaction on genomic DNA (gDNA) in each cell in the plurality of cells. In some embodiments, only the gDNA of cells that have a high level of expression of the target of interest or have a low level of expression of the target of interest is sequenced. In some embodiments, the sequence reaction is a long read sequencing reaction. Long read sequencing reaction are known in the art and have been described in, for example, Amarasinghe et al. (Genome Biol. 2020 Feb. 7; 21(1):30) which is specifically incorporated by reference herein. The genomic DNA used the sequencing reaction may be any region of genomic DNA of interest. In some embodiments, the genomic DNA comprises a nucleic acid sequence corresponding to the first expression cassette.

[0070] In some embodiments, in place of extracting and sequencing gDNA, perturb-seq may be used. Peturb-seq is known in the art and has been described by, for example, Schraivogel et al. (Nat Methods. 2020 June; 17(6):629-635) which is incorporated by reference herein.

[0071] The first and/or second expression cassette of the present disclosure may be contained in an expression vector. Suitable expression vectors include viral expression vectors (e.g. viral vectors based on vaccinia virus; poliovirus; adenovirus (see, e.g., Li et al., Invest Opthalmol Vis Sci 35:2543 2549, 1994; Borras et al., Gene Ther 6:515 524, 1999; Li and Davidson, PNAS 92:7700 7704, 1995; Sakamoto et al., H Gene Ther 5:1088 1097, 1999; WO 94/12649, WO 93/03769; WO 93/19191; WO 94/28938; WO 95/11984 and WO 95/00655); adeno-associated virus (AAV) (see, e.g., Ali et al., Hum Gene Ther 9:81 86, 1998, Flannery et al., PNAS 94:6916 6921, 1997; Bennett et al., Invest Opthalmol Vis Sci 38:2857 2863, 1997; Jomary et al., Gene Ther 4:683 690, 1997, Rolling et al., Hum Gene Ther 10:641 648, 1999; Ali et al., Hum Mol Genet 5:591 594, 1996; Srivastava in WO 93/09239, Samulski et al., J. Vir. (1989) 63:3822-3828; Mendelson et al., Virol. (1988) 166:154-165; and Flotte et al., PNAS (1993) 90:10613-10617); SV40; herpes simplex virus; human immunodeficiency virus (see, e.g., Miyoshi et al., PNAS 94:10319 23, 1997; Takahashi et al., J Virol 73:7812 7816, 1999); a retroviral vector (e.g., Murine Leukemia Virus, spleen necrosis virus, and vectors derived from retroviruses such as Rous Sarcoma Virus, Harvey Sarcoma Virus, avian leukosis virus, a lentivirus, human immunodeficiency virus, myeloproliferative sarcoma virus, and mammary tumor virus); and the like, and transposons such as sleeping beauty or piggyback. In some cases, a recombinant expression vector of the present disclosure is a recombinant adeno-associated virus (AAV) vector.

[0072] In some embodiments, the first expression cassette is contained in a lentivirus expression vector. In some embodiments, the second expression cassette is contained in a lentivirus expression vector. In some embodiments, the first and the second expression cassettes are contained in the same lentivirus expression vector.

### Libraries

[0073] The present disclosure provides libraries comprise a plurality of expression cassettes each comprising a nucleic acid encoding a polypeptide wherein each polypeptide comprises, in order, a first editing domain, a first linker, a nuclease-deficient RNA guided endonuclease domain, a second linker, and a second editing domain; wherein the plurality of expression cassettes comprise at least 1000 different combinations of first and second editing domain combinations.

[0074] The first and second editing domain may any combination of the editing domains disclosed in Table 4. In some embodiments, the first editing domain is any one of N1-N349 as defined by Table 4. In some embodiments, the second editing domain is any one of C1-C349 as defined by Table 4. In some embodiments, the first and second linker is an XTEN linker. In some embodiments, the nuclease-deficient RNA guided endonuclease domain is a nuclease-deficient CRISPR/Cas effector polypeptide. In some embodiments, the CRISPR/Cas effector polypeptide is a class 2 nuclease-deficient CRISPR/Cas effector polypeptide. In some embodiments, the class 2 nuclease-deficient CRISPR/Cas effector polypeptide is a CRISPR/dCas9 effector polypeptide. In some embodiments, the class 2 nuclease-deficient CRISPR/Cas effector polypeptide is a CRISPR/dCas12 effector polypeptide.

[0075] The libraries of the present disclosure comprise a range of different unique combinations of first and second editing domains. For instance, the libraries may comprise at least 1000, at least 2000, at least 4000, at least 6000, at least 8000, at least 10000, at least 20000, at least 30000, at least 40000, at least 50000, at least 60000, at least 70000, at least 80000, at least 90000, at least 100000 or greater than 100000 unique combinations of first and second editing domains.

### EXAMPLES

### Example 1

[0076] A novel platform for identifying and characterizing programmable gene modulators was developed. The approach involves screening libraries of proteins composed of catalytically inactivated CRISPR associated protein 9 (dCas9) fused to protein domains from human gene products involved in epigenetic processes. Each element of the libraries encodes dCas9 and a discrete domain at each terminus (N and C) of dCas9, resulting in a dual terminus dCas9 fusion protein that can be screened for functional activity in mammalian cells in a high-throughput and unbiased manner. To date two libraries have been constructed composed of 1369 or ˜110,000 unique proteins. Long-read sequencing and analysis method were employed to uncover causative constructs in relation to the phenotype of interest. The use of dCas9, which has been widely shown to be programmable to any region of the genome, allows for the platform to be used to target any genetic element in the genome with ease, including, for example, transcribed or untranscribed genes which could be protein coding or non-coding as well as gene regulatory elements such as enhancers, insulators and topology modulators. Moreover, the format of this platform allows it to be utilized in a variety of biological models, including but not limited to, mammalian cell lines, primary cells, and in vivo models.

[0077] This approach differs from conventional methods of gene editor discovery by bypassing time- and labor-intensive construct development, which is most frequently done in an arrayed format and at low throughput. Moreover, the sequencing and analysis methods allow for the identification of active editors without relying on construct barcodes, which are easily decoupled from their cogent construct through lentiviral recombination, thus recovering truly active constructs.

### Example 2

[0078] Proof-of-concept combinatorial transcriptional effector library modulates CD55 expression. We report the generation of RNA-guided dual transcriptional effector libraries. We generated a proof-of-concept dual-fusion transcriptional effector domain library consisting of 37 protein domains fused on either terminus of a catalytically inactive Cas9 (dCas9). Of the 37 protein domains used in the preliminary library, 32 domains were extracted from 20 genes (see methods) and 5 domains come from previously characterized gene modulators(1-4). The 20 genes represented in the small-scale library were selected because they have been thoroughly characterized as genes whose products modify gene expression via epigenetic or transcriptional modulation. The inclusion of domains on both the N- and C-termini of dCas9 generated 1,369 dual terminus fusion proteins, hereby referred to as Library 1 (L1) (FIG. 1).

[0079] Using a K562 cell line expressing a sgRNA targeting CD55, we transduced library 1 and selected for domain construct integration via puromycin selection (FIG. 2, see methods), with two independent technical replicates. On Day 8 post infection. >20e6 cells per replicate were analyzed via FACS and sorted based on CD55 expression (CD55-high and -low populations), along with an unsorted population, maintaining greater than 10,000-fold coverage of L1. Full length effector constructs were amplified from genomic DNA and sequenced using long read sequencing.

[0080] 92.8-93.4% of Library 1 was successfully represented in the screen (1270 to 1278 of 1369 possible combinations, replicate dependent) in the unsorted population of infected cells, with slight drop out of library elements that were not recoded for both termini prior to synthesis. Library 1 replicates were highly correlated for all 3 conditions [Pearson correlation coefficient (R): CD55^{high}=0.99 (p<2.2c-16), CD55^{low}=0.99 (p<2.2c-16), unsorted=0.98 (p<2.2e-16)](FIG. 3), suggesting that our combinatorial transcriptional effector platform is robust and reproducible across replicates.

[0081] L1 targeting CD55 in K562s, nominated 187 significantly enriched dual-transcriptional effectors (18.57%, p<=0.05) of 1007 fusion proteins that were detected after count filtering. Enriched hits consisted of both activators and repressors of CD55, with many more activators identified compared to repressors (146 and 41 effector combinations, respectively) highlighted by the long tail of activation (FIG. 4). We identified both significant activators (n=91) and repressors (n=8) that are 2-fold more enriched in their respective populations [abs(Log 2FoldChange)>1].

[0082] As further proof-of-method, known dCas9-guided transcriptional regulators developed in the Gilbert and Weissman laboratories(1,5) or by other labs in the field(2) including dCas9-VPR and dCas9-KRAB containing constructs, were identified in the CD55 activating and repressing categories, respectively (FIG. 5).

[0083] Large-scale combinatorial transcriptional effector discovery. Our large-scale library consists of combinations of 347 effector domains fused to the N or C-terminus of dCas9, resulting in 110,554 combinations of a possible 120,409 combinations after domain synthesis dropout, termed Library 2. Screens were carried out in K562 cells and the domain library was recruited to the target locus, CD55, via a single gRNA (as described in the library 1 screen). Sequencing depth was limited using 4 Sequel II lanes for two replicates of both high and low CD55-expressing cells, such that 72,547-77,472 of 110,554 domains were detected (65.6-70.1%, replicate and condition specific) prior to count threshold filtering. After filtering for fusion proteins with 10 counts per replicate and condition, counts were normalized (see methods) and Log₂(Fold Change) was calculated. Despite low library coverage in sequencing, Library 2 was highly correlated across replicates (FIG. 6) for both CD55^{HIGH} and CD55^{LOW} conditions [Pearson correlation coefficient (R): CD55^{high}=0.94, CD55^{low}=0.90].

[0084] We observed 3709 significant hits (p value<=0.05); 1803 (48.6%) increased CD55 expression more than 2-fold, and 1602 (43.2%) repressed CD55 expression more than 2-fold (FIGS. 7 and 8). Notably, with the inclusion of additional domains in Library 2 relative to Library 1, we see an increase in the range of tunable CD55 expression, which was limited on the repression side in Library 1, emphasizing our system as a platform for epigenetic editor discovery and tunable locus-specific gene expression dependent on the domain pair combination.

[0085] Combinatorial effector domain screening enables domain epistasis analyses. Our library design of effectors fused to both termini of dCas9 enables analyses of position-specific effects when in either the N- or C-terminal position of a particular effector pair. Further, we can begin to uncover the transcriptional effects in the context of the same effector domains in different orientations with respect to dCas9, enabling future approaches in synthetic protein design for establishing what constitutes effective epigenetic editors.

[0086] For example, including position for each domain (N- or C-terminal position of dCas9) as a factor in our analyses (using DESeq2, (6)) we can identify effector pairs that have significantly different expression profiles-enriched in activator or repressor profiles (or inactive)—suggesting that specific domains combinations in our library prefer specific conformations for effective activity. Specifically, we identify effectors SETD1A and KDM5A as one such pair in which N- vs C-terminal positions impact CD55 expression in the large-scale screen (FIG. 9). In this combination, when SETD1A is in the N-terminal position of the effector pair, it is not enriched in the CD55^{HIGH} population, compared to when SETD1A is in the C terminal position, where it is a strong transcriptional activator of CD55. Our screening platform enables future analyses like this one to identify both position-specific effects and synergy among domain combinations.

### Methods

### Library Design

[0087] Library 1 (37×37) Design. We designed two libraries that differ in size. The small-scale library is comprised of 37 domains; 32 domains were extracted in an unbiased fashion from 20 genes and 5 domains come from previously characterized gene modulators (1-4). The 20 genes represented in the small-scale library were selected because they have been thoroughly characterized as genes whose products modify gene expression via epigenetic or transcriptional modulation. The 37 domains were then synthesized by Twist Bioscience as DNA constructs expressed at the N- and C-termini of dCas9, resulting in 1,369 dual terminus fusion proteins. Library one ranges in size from 4896 base pairs (bp) in length to 11,346 bp in length, with the mean length equal to 7084 bp.

[0088] Library 2 (347×347) Design. The large-scale library is comprised of 347 domains. 266 of these domains were extracted from 194 genes obtained from dbEM, a database of epigenetic modifiers(7). 81 previously published domains were included as positive controls(8,9). The same domains of the small-scale library were included in the large-scale library to maximize the probability of finding highly effective pairs of domains. Individual domains in the large-scale library range between 135 and 3861 base pairs, with a median length of 1301 base pairs. The large-scale library was synthesized in the same manner as the small-scale library by Twist Bioscience. Of the 347 domains in the library, ˜95% were synthesized successfully, resulting in a total of 110,554 dual terminus dCas9 fusion proteins.

### Library Generation

[0089] Domain Synthesis. N and C terminal elements, along with the constant dCas9 fragment, were synthesized and assembled by Twist Biosciences. Our dCas9 fragment consists of: XTEN16 linker-2×NLS sequences-dCas9-XTEN80. The complete list of N-terminal and C-terminal domains can be found in Table 4.

### Library 1 Screens

[0090] Library 1 (37×37) Amplification. The library was diluted to 10 ng/uL. For the first transformation, 100 ng (10 uL of 10 ng/uL) were transformed into 75 uL competent Stellar E. coli cells (Takara) by heat shocking the cells at 42 C for 42s. Cells were allowed to recover on ice for 2 min then recovered in SOC medium (final volume of 1 mL) at 37 C and 300 rpm. After a one hour recovery, 250 μL of transformed cells were plated on each of two 24×24 cm (576 cm²) LB-agar plates supplemented with carbenicillin (100 μg/mL. The following day, colonies were counted and each plate contained 2.9e4 colonies, resulting in 20.5-fold coverage of the library per plate.

[0091] For the second transformation, 100 ng of the library were transformed into 75 uL competent Stellar E. coli cells (Takara) in each of two parallel transformation reactions. Cells were allowed to recover on ice for 2 min then recovered in pre-warmed SOC medium (final volume of 1 mL) at 37 C and 300 rpm. After a one hour recovery, the parallel transformations were combined and 350 μL of transformed cells were plated on each of five 24×24 cm (576 cm²) LB-agar plates supplemented with carbenicillin. The following day, the five plates were found to have a slightly larger number of colonies as the two plates from the first transformation by visual inspection, resulting in >150-fold coverage of the library.

[0092] All seven plates were scraped to collect the bacterial colonies using 20-25 mL LB with an additional 25 mL LB wash per plate. The library was isolated using the ZymoPure II Gigaprep kit (Zymo) following manufacturer's instructions. The yield was 1612 ng/uL in ˜4 mL, for a total amount of 6.5 mg library DNA.

[0093] Lentivirus preparation. On day −1 of lentiviral prep (D-1), 6.5e6 HEK293T cells were seeded in each of 14 15 cm dishes. Cells were grown in DMEM (Gibco) supplemented with 10% FBS (VWR) and 1% penicillin, streptomycin, and glutamine (Gibco), henceforth dubbed “complete DMEM”. The following day (DO), cells were transfected with the lentiviral packaging plasmids pGagPol, pTat, pRev, and VSVG and the library at a 1:1:1:2:15 ratio by mass using Opti-MEM (Gibco) and TransIT-LT1 reagent (Mirus Technologies). The following morning (D1), media was replaced with fresh DMEM-complete supplemented with 15 mM sterile HEPES and 1× ViralBoost reagent (ALSTEM Bio). In the afternoon of the following day (D2), viral supernatant was harvested and filtered on a 0.45 um PVDF filter bottle.

[0094] Lentiviral infection. The day before infection (D-1), 5e6 cells (K562 cells expressing endogenous CD55 and previously transduced with a single guide RNA vector targeting the CD55 promoter) were seeded in each of 14 15 cm dishes. On the day of infection (D0), harvested virus was supplemented with 8 mg/mL polybrene for a final concentration of ˜16 ug/mL polybrene. Reporter cells were 40-50% confluent when 24 mL viral supernatant was added per 15 cm dish, for a final volume of 44 mL media per dish and a final concentration of ˜8.7 ug/mL polybrene. Assuming a 24-hour cell division rate, ˜140e6 cells were present at infection. Assuming 2% infection rate (based on previous small-scale lentiviral titer assays), 2.8e6 cells were infected, resulting in ˜2000-fold coverage of the library at the time of infection.

[0095] Puromycin selection. 48 hours post infection (D2), media was aspirated, each 15 cm dish was gently washed with 5 mL PBS (Gibco), and cells were detached using 5 mL 0.25% trypsin-EDTA (Gibco). The trypsinization was quenched with 15 mL complete DMEM and cells were pooled then pelleted by centrifugation. After resuspension in 7 mL complete DMEM, cells were counted on the Countess II Automated Cell Counter (ThermoFisher) and 140e6 cells (representing 1,000-fold coverage of the library) were isolated and resuspended in complete DMEM supplemented with 2.5 ug/mL puromycin (Gibco). Two independent technical replicates were initiated at this step. 24 hours post initiation of puromycin treatment, cells were visually inspected by bright-field microscopy and appeared 20-30% live.

[0096] Four days post infection (D4) and 48 hours post initiation of puromycin treatment, media was replaced with fresh complete DMEM supplemented with 2.5 ug/mL puromycin (Gibco).

[0097] Recovery from puromycin treatment. Two days later (D6), media was aspirated, each 15 cm dish was gently washed with 5 mL PBS (Gibco), and cells were detached using 5 mL 0.25% trypsin-EDTA (Gibco). The trypsinization was quenched with 15 mL complete DMEM and cells within the same replicate were pooled then pelleted by centrifugation. Cells were counted three times per replicate and the average cell count was used to calculate an approximate infectivity rate by comparing the observed cell count to the expected cell count if 100% of cells had been infected, assuming cells divided every 24 hours. This produced approximate infection rates of 36% for replicate 1 and 28% for replicate 2, which were much higher than expected. Assuming 70% puro selection (i.e. only 70% of the cells at D6 were effector-positive), 2e3 cells would represent 1-fold coverage of the library. To maintain 10,000-fold coverage of the library, 20e6 cells would need to be plated. As such, 5e6 cells were seeded in each of 5 15 cm dishes per replicate, for a total of 25e6 cells per replicate and representing >10,000-fold coverage of the library.

[0098] FACS-based sort. On day 8 post infection, media was aspirated, each 15 cm dish was gently washed with 5 mL PBS (Gibco), and cells were detached using 5 mL 0.25% trypsin-EDTA (Gibco). The trypsinization was quenched with 15 mL complete DMEM and cells within the same replicate were pooled then pelleted by centrifugation. Each cell pellet was washed with FACS media, stained for CD55 expression (50 ul/mL CD55-APC, Biolegend) and sorted based on CD55 expression. Specifically, cells were stained at 10e6 cells/mL (in FACS buffer) with 50 ul/mL CD55-APC Ab for 25 min on ice, followed by FACS buffer addition and centrifugation. Cells were counted then pelleted by centrifugation and resuspended in FACS media-1 (1% FBS in PBS) for a final concentration of 10e6 cells/mL.

[0099] For each replicate, >20e6 cells were analyzed on a FACSAria Fusion (BD), maintaining >10,000-fold coverage of the library. 5e6 unsorted cells were pelleted by centrifugation at 1,000×g for 5 min, media was aspirated, and cells were placed at −80 C.

[0100] Harvesting samples, quartile bins. For quartile binning, 5e6 cells in the bottom 25% of CD55 expression and 5e6 cells in the top 25% of CD55 expression were sorted, corresponding to the “Q_low” and “Q_high” samples, respectively. Cells were collected in 15 mL conical tubes pre-coated with FBS. Cells were pelleted by centrifugation at 1,000×g for 5 min, media was aspirated, and cells were placed at −80 C.

[0101] Genomic DNA extraction. Genomic DNA was extracted using a NucleoSpin Tissue kit (Machery Nagel). Replicate 1 samples were eluted in 5e6 uL water and replicate 2 samples were eluted in 150 uL water. Sample concentrations were measured on a NanoDrop One (ThermoFisher). Expected yield for this genomic DNA extraction kit is 20-35 ug from up to e7 cells; however, all but one sample was outside that range (5 samples were below the range and 4 samples were above the range).

TABLE 3

| | | | | Total | | |
|---|---|---|---|---|---|---|
| | | Input | [gDNA] | DNA | Primer | # |
| Condition | Label | cells | (ng/uL) | (ug) | pair | PCRs |
| Replicate 1, | R1 uns | 5e6 | 774 | 77.4 | o180 | 16 |
| unsorted | | | | | o192 | |
| Replicate 1, high | R1 Qhi | 5e6 | 102 | 10.2 | o181 | 3 |
| expression quartile | | | | | o193 | |
| Replicate 1, low | R1 Qlo | 5e6 | 121 | 12.1 | o182 | 3 |
| expression quartile | | | | | o194 | |
| Replicate 1, high | R1 | 8e6 | 71 | 7.1 | o183 | 2 |
| expression grown out | high | | | | o195 | |
| Replicate 1, low | R1 off | 5e6 | 160 | 16.0 | o184 | 4 |
| expression grown out | | | | | o196 | |
| Replicate 2, | R2 uns | 5e6 | 124.5 | 18.7 | o185 | 4 |
| unsorted | | | | | o197 | |
| Replicate 2, high | R2 Qhi | 5e6 | 277.5 | 41.6 | o186 | 9 |
| expression quartile | | | | | o198 | |
| Replicate 2, low | R2 Qlo | 5e6 | 395.9 | 59.4 | o187 | 12 |
| expression quartile | | | | | o199 | |
| Replicate 2, high | R2 | 6e6 | 160.1 | 24.0 | o188 | 5 |
| expression grown out | high | | | | o200 | |
| Replicate 2, low | R2 off | 5e6 | 455.3 | 68.3 | o189 | 14 |
| expression grown out | | | | | o201 | |

[0102] PCRs. A first round of test PCRs was conducted with barcoded primers and 1 ug genomic DNA per sample per replicate. These test PCRs were analyzed by gel electrophoresis for visual confirmation of amplification before proceeding with the full set of genomic DNA PCRs. The test PCRs for replicate 1 included plasmid library amplification as a positive control and the test PCRs for replicate 2 included a no DNA amplification as a negative control. All PCRs worked and all controls validated.

[0103] Genomic DNA PCRs for both replicates were conducted with ˜5 ug genomic DNA per 100 uL reaction. Each reaction consisted of 50 uL NEBNext Ultra II Q5 master mix, 1 uL 100 uM barcoded forward primer, 1 uL 100 uM barcoded reverse primer, ˜5 ug gDNA, water to 100 uL. Reactions were kept on ice until they were placed in a thermal cycler for the following PCR: 98° C. for 30s, 28×[98° C. for 10s, 71° C. for 30s, 72° C. for 11 min], 72° C. for 5 min, hold at 4° C. All gDNA was processed. PCRs for each sample of each replicate were pooled and analyzed by gel electrophoresis (FIG. 11).

[0104] AMPure PB magnetic bead PCR cleanup. Before conducting magnetic bead cleanup and concentration of the PCR products, an aliquot of each sample was diluted 1:10 and analyzed on a BioAnalyzer (Agilent).

[0105] Samples were then cleaned and concentrated using the AMPure PB bead protocol (Pacific Biosciences) with 0.45× bead to sample ratio to size select amplicons 3-15 kb in size. Magnetic bead purification was conducted according to “Procedure & Checklist—Preparing SMRTbell Libraries using Pacific Biosciences Barcoded Universal Primers for Multiplexing Amplicons” (Pacific Biosciences). Samples were eluted in 5 uL water per number of PCR reactions. An aliquot of each sample was diluted 1:10 and analyzed on a NanoDrop One (ThermoFisher), BioAnalyzer (Agilent), and Qubit (Invitrogen) for total nucleic acid concentration and quality, amplicon molarity, and total DNA concentration, respectively.

### Sequencing Read Processing and Analysis

[0106] Circular consensus sequence (CCS) generation. subreads.bam files were exported from Sequel IIe (Pacific Biosciences) and Circular Consensus Sequences (CCS) were generated using ccs (10) to produce a BAM file. Default parameters were used with the addition of the threads parameter (−j 40).

[0107] Demultiplexing of BAM files. BAM files of CCS were demultiplexed using lima (Pacific Biosciences) to produce BAM files for each sample. Default parameters were used with the addition of the threads parameter (−j 10).

[0108] Sequence processing. Briefly, individual BAM files were converted to fastq files using bam2fq (samtools¹¹) and trimmed using trimfq (https://github.com/lh3/seqtk) such that 16 nucleotides on either end were excluded. The parameters were as follows: seqtk trimfq -b 16 -e 16 sample.ccs.fq>sample.ccs.fq

[0109] After trimming, samples were processed using scripts developed based on knock-knock(12) to generate three-part alignment counts (FIG. 10). A count threshold of 10 was set for all domain pairs per replicate. Following count filtering, DESeq2(6) was used for downstream analyses with condition (high vs low expression) used as the covariate(“Design”) unless otherwise noted.

[0110] While the present invention has been described with reference to the specific embodiments thereof, it should be understood by those skilled in the art that various changes may be made and equivalents may be substituted without departing from the true spirit and scope of the invention. In addition, many modifications may be made to adapt a particular situation, material, composition of matter, process, process step or steps, to the objective, spirit and scope of the present invention. All such modifications are intended to be within the scope of the claims appended hereto.

### REFERENCES

[0111] 1. Gilbert, L. A. et al. CRISPR-Mediated Modular RNA-Guided Regulation of Transcription in Eukaryotes. Cell 154, 442-451 (2013).
[0112] 2. Chavez, A. et al. Highly efficient Cas9-mediated transcriptional programming. Nat Methods 12. 326-328 (2015).
[0113] 3. Hilton, I. B. et al. Epigenome editing by a CRISPR-Cas9-based acetyltransferase activates genes from promoters and enhancers. Nat Biotechnol 33, 510-517 (2015).
[0114] 4. Nuñez, J. K. et al. Genome-wide programmable transcriptional memory by CRISPR-based epigenome editing. Cell 184, 2503-2519.e17 (2021).
[0115] 5. Gilbert, L. A. et al. Genome-Scale CRISPR-Mediated Control of Gene Repression and Activation. Cell 159, 647-661 (2014).
[0116] 6. Love, M. I., Huber, W. & Anders, S. Moderated estimation of fold change and dispersion for RNA-seq data with DESeq2. Genome Biol 15, 550 (2014).
[0117] 7. Nanda, J. S., Kumar, R. & Raghava, G. P. S. dbEM: A database of epigenetic modifiers curated from cancerous and normal genomes. Sci Rep-uk 6, 19340 (2016).
[0118] 8. Konermann, S. et al. Optical control of mammalian endogenous transcription and epigenetic states. Nature 500, 472-476 (2013).
[0119] 9. Yeo, N. C. et al. An enhanced CRISPR repressor for targeted mammalian gene regulation. Nat Methods 15, 611-616 (2018).
[0120] 10. Travers, K. J., Chin, C.-S., Rank, D. R., Eid, J. S. & Turner, S. W. A flexible and efficient template format for circular consensus sequencing and SNP detection. Nucleic Acids Res 38, e159-e159 (2010).
[0121] 11. Danecek, P. et al. Twelve years of SAMtools and BCFtools. Gigascience 10, giab008 (2021).
[0122] 12. Canaj, H. et al. Deep profiling reveals substantial heterogeneity of integration outcomes in CRISPR knock-in experiments. Biorxiv 841098 (2019) doi:10.1101/841098.

TABLE 4
List of the N and C terminal domains of Library 1 and 2

| | | | Length | | | Length | |
|---|---|---|---|---|---|---|---|
| | | | of N | | | of C | |
| | N terminal | SEQ | terminal | C terminal | SEQ | terminal | |
| Library | Domain ID | ID NO: | domain | Domain ID | ID NO: | domain | Gene name |
| Lib1, Lib2 | N1 | 16 | 258 | C1 | 363 | 252 | SETD1A |
| Lib1, Lib2 | N2 | 17 | 1236 | C2 | 364 | 1230 | SETD1A |
| Lib1, Lib2 | N3 | 18 | 1290 | C3 | 365 | 1284 | HDAC3 |
| Lib1, Lib2 | N4 | 19 | 3291 | C4 | 366 | 3285 | KDM6A |
| Lib1, Lib2 | N5 | 20 | 519 | C5 | 367 | 513 | KDM1A |
| Lib1, Lib2 | N6 | 21 | 1728 | C6 | 368 | 1722 | KDM1A |
| Lib1, Lib2 | N7 | 22 | 624 | C7 | 369 | 618 | ZNF10 |
| Lib1, Lib2 | N8 | 23 | 225 | C8 | 370 | 219 | MECP2 |
| Lib1, Lib2 | N9 | 24 | 906 | C9 | 371 | 900 | MECP2 |
| Lib1, Lib2 | N10 | 25 | 1236 | C10 | 372 | 1230 | HSF1 |
| Lib1, Lib2 | N11 | 26 | 3447 | C11 | 373 | 3441 | KMT2A |
| Lib1, Lib2 | N12 | 27 | 714 | C12 | 374 | 708 | KMT2A |
| Lib1, Lib2 | N14 | 28 | 795 | C14 | 375 | 789 | RELA |
| Lib1, Lib2 | N15 | 29 | 975 | C15 | 376 | 969 | EP300 |
| Lib1, Lib2 | N16 | 30 | 1815 | C16 | 377 | 1809 | EP300 |
| Lib1, Lib2 | N17 | 31 | 483 | C17 | 378 | 477 | EZH2 |
| Lib1, Lib2 | N18 | 32 | 840 | C18 | 379 | 834 | EZH2 |
| Lib1, Lib2 | N20 | 33 | 822 | C20 | 380 | 816 | KDM1B |
| Lib1, Lib2 | N21 | 34 | 1341 | C21 | 381 | 1335 | KDM1B |
| Lib1, Lib2 | N22 | 35 | 1758 | C22 | 382 | 1752 | TET1 |
| Lib1, Lib2 | N23 | 36 | 2391 | C23 | 383 | 2385 | TET1 |
| Lib1, Lib2 | N24 | 37 | 774 | C24 | 384 | 768 | CTCFL |
| Lib1, Lib2 | N25 | 38 | 276 | C25 | 385 | 270 | CTCFL |
| Lib1, Lib2 | N26 | 39 | 411 | C26 | 386 | 405 | EZH1 |
| Lib1, Lib2 | N27 | 40 | 828 | C27 | 387 | 822 | EZH1 |
| Lib1, Lib2 | N28 | 41 | 2607 | C28 | 388 | 2601 | EHMT2 |
| Lib1, Lib2 | N29 | 42 | 1890 | C29 | 389 | 1884 | ASH2L |
| Lib1, Lib2 | N30 | 43 | 1989 | C30 | 390 | 1983 | KDM3A |
| Lib1, Lib2 | N31 | 44 | 2742 | C31 | 391 | 2736 | DNMT3A |
| Lib1, Lib2 | N32 | 45 | 222 | C32 | 392 | 216 | Gilbert_Lab CRISPRi_KRAB |
| Lib1, Lib2 | N33 | 46 | 1860 | C33 | 393 | 1854 | Hilton 2015 |
| Lib1, Lib2 | N34 | 47 | 912 | C34 | 394 | 906 | DNMT3A-3L_JKNp112 |
| Lib1, Lib2 | N35 | 48 | 1557 | C35 | 395 | 1551 | VPR_JKNp64 |
| Lib1, Lib2 | N36 | 49 | 2163 | C36 | 396 | 2157 | TET1CD_JKNp84 |
| Lib1, Lib2 | N37 | 50 | 927 | C37 | 397 | 921 | KDM6A |
| Lib1, Lib2 | N38 | 51 | 936 | C38 | 398 | 930 | EHMT2 |
| Lib1, Lib2 | N39 | 52 | 1911 | C39 | 399 | 1905 | KDM3A |
| Lib2 | N40 | 53 | 2754 | C40 | 400 | 2751 | OGA_HUMAN |
| Lib2 | N41 | 54 | 2523 | C41 | 401 | 2520 | SMCA5_HUMAN |
| Lib2 | N42 | 55 | 1347 | C42 | 402 | 1341 | KMT2E_HUMAN |
| Lib2 | N43 | 56 | 1326 | C43 | 403 | 1323 | SETD4_HUMAN |
| Lib2 | N44 | 57 | 3147 | C44 | 404 | 3141 | KMT2D_HUMAN |
| Lib2 | N45 | 58 | 657 | C45 | 405 | 651 | KMT2D_HUMAN |
| Lib2 | N46 | 59 | 1551 | C46 | 406 | 1548 | SMRD1_HUMAN |
| Lib2 | N47 | 60 | 1305 | C47 | 407 | 1302 | ANM2_HUMAN |
| Lib2 | N48 | 61 | 372 | C48 | 408 | 369 | SETD5_HUMAN |
| Lib2 | N49 | 62 | 2130 | C49 | 409 | 2127 | NCOA1_HUMAN |
| Lib2 | N50 | 63 | 2208 | C50 | 410 | 2202 | NCOA1_HUMAN |
| Lib2 | N51 | 64 | 993 | C51 | 411 | 990 | UCHL5_HUMAN |
| Lib2 | N52 | 65 | 2016 | C52 | 412 | 2013 | CBP_HUMAN |
| Lib2 | N53 | 66 | 1515 | C53 | 413 | 1509 | CBP_HUMAN |
| Lib2 | N54 | 67 | 2235 | C54 | 414 | 2229 | CBP_HUMAN |
| Lib2 | N55 | 68 | 1281 | C55 | 415 | 1278 | RBBP4_HUMAN |
| Lib2 | N56 | 69 | 924 | C56 | 416 | 918 | SUV92_HUMAN |
| Lib2 | N57 | 70 | 1188 | C57 | 417 | 1185 | ANM8_HUMAN |
| Lib2 | N58 | 71 | 2472 | C58 | 418 | 2469 | TF3C4_HUMAN |
| Lib2 | N59 | 72 | 843 | C59 | 419 | 840 | INO80_HUMAN |
| Lib2 | N60 | 73 | 3117 | C60 | 420 | 3111 | INO80_HUMAN |
| Lib2 | N61 | 74 | 1263 | C61 | 421 | 1260 | HAT1_HUMAN |
| Lib2 | N62 | 75 | 2661 | C62 | 422 | 2658 | KMT5B_HUMAN |
| Lib2 | N63 | 76 | 1260 | C63 | 423 | 1257 | SMYD5_HUMAN |
| Lib2 | N64 | 77 | 1470 | C64 | 424 | 1467 | HDAC2_HUMAN |
| Lib2 | N65 | 78 | 1392 | C65 | 425 | 1389 | MCRS1_HUMAN |
| Lib2 | N66 | 79 | 1176 | C66 | 426 | 1173 | DOT1L_HUMAN |
| Lib2 | N67 | 80 | 1167 | C67 | 427 | 1164 | PRDM9_HUMAN |
| Lib2 | N68 | 81 | 666 | C68 | 428 | 660 | MBD3_HUMAN |
| Lib2 | N69 | 82 | 474 | C69 | 429 | 471 | SETB2_HUMAN |
| Lib2 | N70 | 83 | 1479 | C70 | 430 | 1473 | SETB2_HUMAN |
| Lib2 | N71 | 84 | 1374 | C71 | 431 | 1371 | RUVB1_HUMAN |
| Lib2 | N72 | 85 | 2568 | C72 | 432 | 2562 | KDM7A_HUMAN |
| Lib2 | N73 | 86 | 240 | C73 | 433 | 237 | KDM5D_HUMAN |
| Lib2 | N74 | 87 | 447 | C74 | 434 | 441 | KDM5D_HUMAN |
| Lib2 | N75 | 88 | 1011 | C75 | 435 | 1005 | KDM5D_HUMAN |
| Lib2 | N76 | 89 | 1281 | C76 | 436 | 1275 | KDM5D_HUMAN |
| Lib2 | N77 | 90 | 921 | C77 | 437 | 915 | KDM5D_HUMAN |
| Lib2 | N78 | 91 | 621 | C78 | 438 | 618 | KAT6A_HUMAN |
| Lib2 | N79 | 92 | 1500 | C79 | 439 | 1494 | KAT6A_HUMAN |
| Lib2 | N80 | 93 | 1473 | C80 | 440 | 1467 | KAT6A_HUMAN |
| Lib2 | N81 | 94 | 2019 | C81 | 441 | 2016 | NCOA3_HUMAN |
| Lib2 | N82 | 95 | 1215 | C82 | 442 | 1209 | NCOA3_HUMAN |
| Lib2 | N83 | 96 | 1455 | C83 | 443 | 1452 | SMRD3_HUMAN |
| Lib2 | N84 | 97 | 3087 | C84 | 444 | 3084 | IN80D_HUMAN |
| Lib2 | N85 | 98 | 1290 | C85 | 445 | 1287 | SMYD3_HUMAN |
| Lib2 | N86 | 99 | 3129 | C86 | 446 | 3123 | PHF2_HUMAN |
| Lib2 | N87 | 100 | 1104 | C87 | 447 | 1101 | SETD7_HUMAN |
| Lib2 | N88 | 101 | 591 | C88 | 448 | 588 | ING4_HUMAN |
| Lib2 | N89 | 102 | 2646 | C89 | 449 | 2640 | CHD4_HUMAN |
| Lib2 | N90 | 103 | 1017 | C90 | 450 | 1011 | CHD4_HUMAN |
| Lib2 | N91 | 104 | 1917 | C91 | 451 | 1914 | ANM5_HUMAN |
| Lib2 | N92 | 105 | 1476 | C92 | 452 | 1473 | SMYD1_HUMAN |
| Lib2 | N93 | 106 | 1284 | C93 | 453 | 1281 | ACL6B_HUMAN |
| Lib2 | N94 | 107 | 2124 | C94 | 454 | 2118 | KDM3B_HUMAN |
| Lib2 | N95 | 108 | 1425 | C95 | 455 | 1422 | SETD6_HUMAN |
| Lib2 | N96 | 109 | 2463 | C96 | 456 | 2457 | CHD3_HUMAN |
| Lib2 | N97 | 110 | 1314 | C97 | 457 | 1308 | CHD3_HUMAN |
| Lib2 | N98 | 111 | 501 | C98 | 458 | 495 | A4FU79_HUMAN |
| Lib2 | N99 | 112 | 582 | C99 | 459 | 579 | IN80C_HUMAN |
| Lib2 | N100 | 113 | 1377 | C100 | 460 | 1374 | TAF1_HUMAN |
| Lib2 | N101 | 114 | 1695 | C101 | 461 | 1689 | TAF1_HUMAN |
| Lib2 | N102 | 115 | 1602 | C102 | 462 | 1596 | TAF1_HUMAN |
| Lib2 | N103 | 116 | 1431 | C103 | 463 | 1428 | B4DKA4_HUMAN |
| Lib2 | N104 | 117 | 438 | C104 | 464 | 435 | MBD2_HUMAN |
| Lib2 | N105 | 118 | 600 | C105 | 465 | 597 | MBD2_HUMAN |
| Lib2 | N106 | 119 | 642 | C106 | 466 | 639 | KAT6B_HUMAN |
| Lib2 | N107 | 120 | 1200 | C107 | 467 | 1194 | KAT6B_HUMAN |
| Lib2 | N108 | 121 | 1284 | C108 | 468 | 1278 | KAT6B_HUMAN |
| Lib2 | N109 | 122 | 2805 | C109 | 469 | 2799 | KAT6B_HUMAN |
| Lib2 | N110 | 123 | 1395 | C110 | 470 | 1392 | JMJD4_HUMAN |
| Lib2 | N111 | 124 | 255 | C111 | 471 | 252 | KDM5A_HUMAN |
| Lib2 | N112 | 125 | 1005 | C112 | 472 | 999 | KDM5A_HUMAN |
| Lib2 | N113 | 126 | 1305 | C113 | 473 | 1299 | KDM5A_HUMAN |
| Lib2 | N114 | 127 | 1173 | C114 | 474 | 1167 | KDM5A_HUMAN |
| Lib2 | N115 | 128 | 3090 | C115 | 475 | 3087 | HDAC5_HUMAN |
| Lib2 | N116 | 129 | 1131 | C116 | 476 | 1128 | ANM6_HUMAN |
| Lib2 | N117 | 130 | 2502 | C117 | 477 | 2499 | HDAC6_HUMAN |
| Lib2 | N118 | 131 | 1161 | C118 | 478 | 1155 | HDAC6_HUMAN |
| Lib2 | N119 | 132 | 1293 | C119 | 479 | 1290 | ACL6A_HUMAN |
| Lib2 | N120 | 133 | 1224 | C120 | 480 | 1221 | RING1_HUMAN |
| Lib2 | N121 | 134 | 3870 | C121 | 481 | 3864 | KMT2A_HUMAN |
| Lib2 | N122 | 135 | 3168 | C122 | 482 | 3162 | KMT2A_HUMAN |
| Lib2 | N123 | 136 | 657 | C123 | 483 | 651 | KMT2A_HUMAN |
| Lib2 | N124 | 137 | 3123 | C124 | 484 | 3120 | SET1B_HUMAN |
| Lib2 | N125 | 138 | 2790 | C125 | 485 | 2784 | SET1B_HUMAN |
| Lib2 | N126 | 139 | 1095 | C126 | 486 | 1092 | SETMR_HUMAN |
| Lib2 | N127 | 140 | 717 | C127 | 487 | 711 | SETMR_HUMAN |
| Lib2 | N128 | 141 | 1803 | C128 | 488 | 1800 | HAIR_HUMAN |
| Lib2 | N129 | 142 | 1701 | C129 | 489 | 1695 | HAIR_HUMAN |
| Lib2 | N130 | 143 | 1083 | C130 | 490 | 1080 | PRDM2_HUMAN |
| Lib2 | N131 | 144 | 1890 | C131 | 491 | 1884 | PRDM2_HUMAN |
| Lib2 | N132 | 145 | 1521 | C132 | 492 | 1515 | PRDM2_HUMAN |
| Lib2 | N133 | 146 | 1014 | C133 | 493 | 1008 | KAT8_HUMAN |
| Lib2 | N134 | 147 | 1695 | C134 | 494 | 1692 | KDM2A_HUMAN |
| Lib2 | N135 | 148 | 1461 | C135 | 495 | 1455 | KDM2A_HUMAN |
| Lib2 | N136 | 149 | 1215 | C136 | 496 | 1212 | JMJD6_HUMAN |
| Lib2 | N137 | 150 | 2565 | C137 | 497 | 2562 | DNM3B_HUMAN |
| Lib2 | N138 | 151 | 765 | C138 | 498 | 762 | TFPT_HUMAN |
| Lib2 | N139 | 152 | 2724 | C139 | 499 | 2721 | KDM6B_HUMAN |
| Lib2 | N140 | 153 | 2220 | C140 | 500 | 2214 | KDM6B_HUMAN |
| Lib2 | N141 | 154 | 2013 | C141 | 501 | 2010 | SMRC1_HUMAN |
| Lib2 | N142 | 155 | 1980 | C142 | 502 | 1974 | SMRC1_HUMAN |
| Lib2 | N143 | 156 | 2196 | C143 | 503 | 2193 | KDM4B_HUMAN |
| Lib2 | N144 | 157 | 1989 | C144 | 504 | 1986 | UTY_HUMAN |
| Lib2 | N145 | 158 | 2064 | C145 | 505 | 2061 | UTY_HUMAN |
| Lib2 | N146 | 159 | 2130 | C146 | 506 | 2127 | KDM4A_HUMAN |
| Lib2 | N147 | 160 | 2106 | C147 | 507 | 2103 | NSD3_HUMAN |
| Lib2 | N148 | 161 | 1455 | C148 | 508 | 1449 | NSD3_HUMAN |
| Lib2 | N149 | 162 | 678 | C149 | 509 | 672 | MBD1_HUMAN |
| Lib2 | N150 | 163 | 1047 | C150 | 510 | 1044 | HDA11_HUMAN |
| Lib2 | N151 | 164 | 1206 | C151 | 511 | 1203 | SIR7_HUMAN |
| Lib2 | N152 | 165 | 1626 | C152 | 512 | 1623 | CDY1_HUMAN |
| Lib2 | N153 | 166 | 1185 | C153 | 513 | 1179 | KAT7_HUMAN |
| Lib2 | N154 | 167 | 1362 | C154 | 514 | 1359 | NSD2_HUMAN |
| Lib2 | N155 | 168 | 1479 | C155 | 515 | 1473 | NSD2_HUMAN |
| Lib2 | N156 | 169 | 2250 | C156 | 516 | 2247 | A7E2E1_HUMAN |
| Lib2 | N157 | 170 | 2703 | C157 | 517 | 2700 | A7E2E1_HUMAN |
| Lib2 | N158 | 171 | 1785 | C158 | 518 | 1782 | SETB1_HUMAN |
| Lib2 | N159 | 172 | 1887 | C159 | 519 | 1881 | SETB1_HUMAN |
| Lib2 | N160 | 173 | 1185 | C160 | 520 | 1182 | KMT5A_HUMAN |
| Lib2 | N161 | 174 | 2841 | C161 | 521 | 2838 | TET2_HUMAN |
| Lib2 | N162 | 175 | 1071 | C162 | 522 | 1068 | SIR6_HUMAN |
| Lib2 | N163 | 176 | 2082 | C163 | 523 | 2079 | ANM7_HUMAN |
| Lib2 | N164 | 177 | 831 | C164 | 524 | 825 | SIR5_HUMAN |
| Lib2 | N165 | 178 | 2010 | C165 | 525 | 2007 | MTA2_HUMAN |
| Lib2 | N166 | 179 | 1935 | C166 | 526 | 1932 | EHMT1_HUMAN |
| Lib2 | N167 | 180 | 1974 | C167 | 527 | 1968 | EHMT1_HUMAN |
| Lib2 | N168 | 181 | 3162 | C168 | 528 | 3159 | ARI1B_HUMAN |
| Lib2 | N169 | 182 | 3285 | C169 | 529 | 3279 | ARI1B_HUMAN |
| Lib2 | N170 | 183 | 2844 | C170 | 530 | 2838 | NSD1_HUMAN |
| Lib2 | N171 | 184 | 1818 | C171 | 531 | 1812 | ASH1L_HUMAN |
| Lib2 | N172 | 185 | 1023 | C172 | 532 | 1017 | ASH1L_HUMAN |
| Lib2 | N173 | 186 | 867 | C173 | 533 | 861 | SIR4_HUMAN |
| Lib2 | N174 | 187 | 1452 | C174 | 534 | 1449 | HDAC1_HUMAN |
| Lib2 | N175 | 188 | 1395 | C175 | 535 | 1392 | RUVB2_HUMAN |
| Lib2 | N176 | 189 | 1878 | C176 | 536 | 1875 | ARP8_HUMAN |
| Lib2 | N177 | 190 | 1008 | C177 | 537 | 1005 | KDM5C_HUMAN |
| Lib2 | N178 | 191 | 1392 | C178 | 538 | 1389 | KMT5C_HUMAN |
| Lib2 | N179 | 192 | 1599 | C179 | 539 | 1596 | SMRD2_HUMAN |
| Lib2 | N180 | 193 | 2700 | C180 | 540 | 2697 | SET1A_HUMAN |
| Lib2 | N181 | 194 | 2436 | C181 | 541 | 2430 | SET1A_HUMAN |
| Lib2 | N182 | 195 | 1788 | C182 | 542 | 1785 | MTA3_HUMAN |
| Lib2 | N183 | 196 | 1221 | C183 | 543 | 1215 | KMT2C_HUMAN |
| Lib2 | N184 | 197 | 2913 | C184 | 544 | 2907 | PHF8_HUMAN |
| Lib2 | N185 | 198 | 1281 | C185 | 545 | 1278 | RBBP7_HUMAN |
| Lib2 | N186 | 199 | 1401 | C186 | 546 | 1398 | RIOX2_HUMAN |
| Lib2 | N187 | 200 | 1305 | C187 | 547 | 1299 | MBD4_HUMAN |
| Lib2 | N188 | 201 | 2418 | C188 | 548 | 2415 | SMYD4_HUMAN |
| Lib2 | N189 | 202 | 846 | C189 | 549 | 843 | ING2_HUMAN |
| Lib2 | N190 | 203 | 1119 | C190 | 550 | 1116 | ANM1_HUMAN |
| Lib2 | N191 | 204 | 1800 | C191 | 551 | 1797 | CDYL_HUMAN |
| Lib2 | N192 | 205 | 2016 | C192 | 552 | 2010 | JHD2C_HUMAN |
| Lib2 | N193 | 206 | 1575 | C193 | 553 | 1572 | KDM4D_HUMAN |
| Lib2 | N194 | 207 | 1272 | C194 | 554 | 1269 | ING1_HUMAN |
| Lib2 | N195 | 208 | 1788 | C195 | 555 | 1785 | SETD3_HUMAN |
| Lib2 | N196 | 209 | 2151 | C196 | 556 | 2148 | MTA1_HUMAN |
| Lib2 | N197 | 210 | 1242 | C197 | 557 | 1239 | SUV91_HUMAN |
| Lib2 | N198 | 211 | 744 | C198 | 558 | 738 | JMJD8_HUMAN |
| Lib2 | N199 | 212 | 1083 | C199 | 559 | 1080 | ING3_HUMAN |
| Lib2 | N200 | 213 | 1827 | C200 | 560 | 1824 | ARP5_HUMAN |
| Lib2 | N201 | 214 | 1821 | C201 | 561 | 1818 | KDM2B_HUMAN |
| Lib2 | N202 | 215 | 1842 | C202 | 562 | 1836 | KDM2B_HUMAN |
| Lib2 | N203 | 216 | 3168 | C203 | 563 | 3165 | SMCA1_HUMAN |
| Lib2 | N204 | 217 | 1053 | C204 | 564 | 1050 | HIF1N_HUMAN |
| Lib2 | N205 | 218 | 954 | C205 | 565 | 951 | JMJD7_HUMAN |
| Lib2 | N206 | 219 | 903 | C206 | 566 | 900 | SETD9_HUMAN |
| Lib2 | N207 | 220 | 2472 | C207 | 567 | 2469 | KDM1B_HUMAN |
| Lib2 | N208 | 221 | 2541 | C208 | 568 | 2538 | ANM9_HUMAN |
| Lib2 | N209 | 222 | 2013 | C209 | 569 | 2010 | HDA10_HUMAN |
| Lib2 | N210 | 223 | 1203 | C210 | 570 | 1200 | SIR3_HUMAN |
| Lib2 | N211 | 224 | 2976 | C211 | 571 | 2970 | KMT2B_HUMAN |
| Lib2 | N212 | 225 | 1137 | C212 | 572 | 1134 | HDAC8_HUMAN |
| Lib2 | N213 | 226 | 1470 | C213 | 573 | 1467 | HBAP1_HUMAN |
| Lib2 | N214 | 227 | 1515 | C214 | 574 | 1512 | HDAC4_HUMAN |
| Lib2 | N215 | 228 | 1749 | C215 | 575 | 1746 | HDAC4_HUMAN |
| Lib2 | N216 | 229 | 561 | C216 | 576 | 558 | ING5_HUMAN |
| Lib2 | N217 | 230 | 399 | C217 | 577 | 396 | CHRC1_HUMAN |
| Lib2 | N218 | 231 | 1074 | C218 | 578 | 1071 | IN80B_HUMAN |
| Lib2 | N219 | 232 | 1311 | C219 | 579 | 1305 | JARD2_HUMAN |
| Lib2 | N220 | 233 | 1608 | C220 | 580 | 1602 | JARD2_HUMAN |
| Lib2 | N221 | 234 | 1305 | C221 | 581 | 1302 | SMYD2_HUMAN |
| Lib2 | N222 | 235 | 738 | C222 | 582 | 735 | IN80E_HUMAN |
| Lib2 | N223 | 236 | 2874 | C223 | 583 | 2871 | FBX10_HUMAN |
| Lib2 | N224 | 237 | 2049 | C224 | 584 | 2043 | KDM4C_HUMAN |
| Lib2 | N225 | 238 | 2007 | C225 | 585 | 2001 | SETD2_HUMAN |
| Lib2 | N226 | 239 | 1473 | C226 | 586 | 1467 | SETD2_HUMAN |
| Lib2 | N227 | 240 | 2247 | C227 | 587 | 2244 | SIR1_HUMAN |
| Lib2 | N228 | 241 | 2757 | C228 | 588 | 2754 | HDAC7_HUMAN |
| Lib2 | N229 | 242 | 1113 | C229 | 589 | 1110 | NFRKB_HUMAN |
| Lib2 | N230 | 243 | 2421 | C230 | 590 | 2415 | NFRKB_HUMAN |
| Lib2 | N231 | 244 | 1005 | C231 | 591 | 999 | KDM5B_HUMAN |
| Lib2 | N232 | 245 | 3039 | C232 | 592 | 3036 | HDAC9_HUMAN |
| Lib2 | N233 | 246 | 444 | C233 | 593 | 438 | HINFP_HUMAN |
| Lib2 | N234 | 247 | 2931 | C234 | 594 | 2925 | SMRC2_HUMAN |
| Lib2 | N235 | 248 | 1830 | C235 | 595 | 1827 | CARM1_HUMAN |
| Lib2 | N236 | 249 | 2244 | C236 | 596 | 2241 | KAT2A_HUMAN |
| Lib2 | N237 | 250 | 1545 | C237 | 597 | 1542 | KAT5_HUMAN |
| Lib2 | N238 | 251 | 3081 | C238 | 598 | 3078 | NAT10_HUMAN |
| Lib2 | N239 | 252 | 1254 | C239 | 599 | 1251 | KDM8_HUMAN |
| Lib2 | N240 | 253 | 1389 | C240 | 600 | 1383 | ANM3_HUMAN |
| Lib2 | N241 | 254 | 1173 | C241 | 601 | 1170 | SIR2_HUMAN |
| Lib2 | N242 | 255 | 2223 | C242 | 602 | 2220 | KAT2B_HUMAN |
| Lib2 | N243 | 256 | 1941 | C243 | 603 | 1938 | DNMT1_HUMAN |
| Lib2 | N244 | 257 | 2781 | C244 | 604 | 2775 | DNMT1_HUMAN |
| Lib2 | N245 | 258 | 543 | C245 | 605 | 537 | TYY1_HUMAN |
| Lib2 | N246 | 259 | 423 | C246 | 606 | 417 | ATRX_HUMAN |
| Lib2 | N247 | 260 | 2745 | C247 | 607 | 2739 | ATRX_HUMAN |
| Lib2 | N248 | 261 | 1665 | C248 | 608 | 1662 | GLYR1_HUMAN |
| Lib2 | N249 | 262 | 879 | C264 | 609 | 873 | MTL5_HUMAN |
| Lib2 | N250 | 263 | 1095 | C250 | 610 | 1092 | HCFC1_HUMAN |
| Lib2 | N251 | 264 | 1971 | C251 | 611 | 1965 | HCFC1_HUMAN |
| Lib2 | N252 | 265 | 1845 | C252 | 612 | 1839 | HCFC1_HUMAN |
| Lib2 | N253 | 266 | 1620 | C253 | 613 | 1617 | RBBP5_HUMAN |
| Lib2 | N254 | 267 | 1851 | C254 | 614 | 1848 | MEN1_HUMAN |
| Lib2 | N255 | 268 | 1329 | C255 | 615 | 1326 | EED_HUMAN |
| Lib2 | N256 | 269 | 2562 | C256 | 616 | 2559 | LSD1-ORF |
| Lib2 | N257 | 270 | 168 | C257 | 617 | 162 | c-Myb-TAD |
| Lib2 | N258 | 271 | 1908 | C258 | 618 | 1902 | Nejire-HAT |
| Lib2 | N259 | 272 | 2661 | C259 | 619 | 2655 | ROS1-CD |
| Lib2 | N260 | 273 | 2700 | C260 | 620 | 2694 | Chd1-CD |
| Lib2 | N261 | 274 | 2286 | C261 | 621 | 2283 | EZH2_ORYLA |
| Lib2 | N262 | 275 | 2244 | C262 | 622 | 2241 | EZH2 |
| Lib2 | N263 | 276 | 1137 | C263 | 623 | 1134 | HDAC8 |
| Lib2 | N264 | 277 | 879 | C249 | 624 | 876 | HAC1-HAT |
| Lib2 | N265 | 278 | 2244 | C265 | 625 | 2241 | EZH2 |
| Lib2 | N266 | 279 | 501 | C266 | 626 | 498 | GADD45A |
| Lib2 | N267 | 280 | 510 | C267 | 627 | 507 | FOXA1-Nterm |
| Lib2 | N268 | 281 | 645 | C268 | 628 | 639 | FOXA1-Cterm |
| Lib2 | N269 | 282 | 513 | C269 | 629 | 510 | PU.1 |
| Lib2 | N270 | 283 | 1350 | C270 | 630 | 1344 | ENL |
| Lib2 | N271 | 284 | 666 | C271 | 631 | 663 | GCN5 |
| Lib2 | N272 | 285 | 825 | C272 | 632 | 822 | Sir2 |
| Lib2 | N273 | 286 | 1101 | C273 | 633 | 1098 | PRDM9-CD |
| Lib2 | N274 | 287 | 462 | C274 | 634 | 459 | UBE2A |
| Lib2 | N275 | 288 | 996 | C275 | 635 | 993 | DOT1L-DOT1 domain |
| Lib2 | N276 | 289 | 1155 | C276 | 636 | 1149 | EHMT2(G9a)-Cterm |
| Lib2 | N277 | 290 | 1242 | C277 | 637 | 1239 | SUV39H1 |
| Lib2 | N278 | 291 | 1941 | C278 | 638 | 1935 | TET2CD |
| Lib2 | N279 | 292 | 1362 | C279 | 639 | 1356 | 6TAL-VP128(TV) |
| Lib2 | N280 | 293 | 324 | C280 | 640 | 318 | CBF1-Cterm |
| Lib2 | N281 | 294 | 159 | C281 | 641 | 153 | VP64 |
| Lib2 | N282 | 295 | 393 | C282 | 642 | 387 | VP160 |
| Lib2 | N283 | 296 | 2847 | C283 | 643 | 2841 | TET3CD |
| Lib2 | N284 | 297 | 948 | C284 | 644 | 942 | p65-HSF1 |
| Lib2 | N285 | 298 | 765 | C285 | 645 | 759 | p65-MyoD |
| Lib2 | N286 | 299 | 393 | C286 | 646 | 387 | VP160 |
| Lib2 | N287 | 300 | 1167 | C287 | 647 | 1161 | G9A[SET] |
| Lib2 | N288 | 301 | 1032 | C288 | 648 | 1026 | SUV[SET] |
| Lib2 | N289 | 302 | 141 | C289 | 649 | 138 | FOG1 |
| Lib2 | N290 | 303 | 363 | C290 | 650 | 360 | HP1aCS |
| Lib2 | N291 | 304 | 1260 | C291 | 651 | 1257 | SS18 |
| Lib2 | N292 | 305 | 1179 | C292 | 652 | 1173 | MQ1(Q147L) |
| Lib2 | N293 | 306 | 1152 | C293 | 653 | 1149 | KRAB-MeCP2 |
| Lib2 | N294 | 307 | 1047 | C294 | 654 | 1044 | DIM5 |
| Lib2 | N295 | 308 | 921 | C295 | 655 | 918 | SET-TAF1B |
| Lib2 | N296 | 309 | 411 | C296 | 656 | 408 | HP1a |
| Lib2 | N297 | 310 | 954 | C297 | 657 | 951 | MesoLo |
| Lib2 | N298 | 311 | 708 | C298 | 658 | 705 | MBD2b |
| Lib2 | N299 | 312 | 927 | C299 | 659 | 924 | HST2 |
| Lib2 | N300 | 313 | 921 | C300 | 660 | 918 | SIRT6 |
| Lib2 | N301 | 314 | 825 | C301 | 661 | 822 | SIRT3 |
| Lib2 | N302 | 315 | 1095 | C302 | 662 | 1092 | HDAC11 |
| Lib2 | N303 | 316 | 2262 | C303 | 663 | 2259 | EZH2 |
| Lib2 | N304 | 317 | 2742 | C304 | 664 | 2739 | DNMT3a |
| Lib2 | N305 | 318 | 711 | C305 | 665 | 708 | NUE |
| Lib2 | N306 | 319 | 780 | C306 | 666 | 777 | CobB |
| Lib2 | N307 | 320 | 855 | C307 | 667 | 852 | KYP |
| Lib2 | N308 | 321 | 687 | C308 | 668 | 684 | HDT1 |
| Lib2 | N309 | 322 | 1029 | C309 | 669 | 1026 | HDAC8 |
| Lib2 | N310 | 323 | 966 | C310 | 670 | 963 | TgSET8 |
| Lib2 | N311 | 324 | 1038 | C311 | 671 | 1035 | Sin3a |
| Lib2 | N312 | 325 | 681 | C312 | 672 | 678 | SetD8 |
| Lib2 | N313 | 326 | 333 | C313 | 673 | 330 | Sall |
| Lib2 | N314 | 327 | 912 | C314 | 674 | 909 | MeCP2 |
| Lib2 | N315 | 328 | 261 | C315 | 675 | 258 | NCoR |
| Lib2 | N316 | 329 | 369 | C316 | 676 | 362 | HP1 |
| Lib2 | N317 | 330 | 1290 | C317 | 677 | 1287 | HDAC3 |
| Lib2 | N318 | 331 | 405 | C318 | 678 | 402 | 4xSID |
| Lib2 | N319 | 332 | 2304 | C319 | 679 | 2298 | mCBP-HAT |
| Lib2 | N320 | 333 | 570 | C320 | 680 | 567 | mMLL3-SET |
| Lib2 | N321 | 334 | 2877 | C321 | 681 | 2871 | MINT_HUMAN |
| Lib2 | N322 | 335 | 1743 | C322 | 682 | 1737 | MINT_HUMAN |
| Lib2 | N323 | 336 | 2325 | C323 | 683 | 2322 | HNRPU_HUMAN |
| Lib2 | N324 | 337 | 639 | C324 | 684 | 636 | LBR_HUMAN |
| Lib2 | N325 | 338 | 1851 | C325 | 685 | 1848 | LBR_HUMAN |
| Lib2 | N326 | 339 | 831 | C326 | 686 | 828 | pf_Sir2A |
| Lib2 | N327 | 340 | 999 | C327 | 687 | 996 | hs_NIPP1 |
| Lib2 | N328 | 341 | 1017 | C328 | 688 | 1014 | hs_PHF19 |
| Lib2 | N329 | 342 | 369 | C329 | 689 | 366 | pbcv1_vSET |
| Lib2 | N330 | 343 | 738 | C330 | 690 | 735 | ce_Set1 |
| Lib2 | N331 | 344 | 900 | C331 | 691 | 894 | mm_G9a |
| Lib2 | N332 | 345 | 837 | C332 | 692 | 831 | hs_SIRT5 |
| Lib2 | N333 | 346 | 981 | C333 | 693 | 975 | sc_RPD3 |
| Lib2 | N334 | 347 | 675 | C334 | 694 | 669 | hs_RCOR1 |
| Lib2 | N335 | 348 | 954 | C335 | 695 | 948 | at_SUVR4 |
| Lib2 | N336 | 349 | 876 | C336 | 696 | 873 | ce_Set4 |
| Lib2 | N337 | 350 | 3045 | C337 | 697 | 3039 | PHF3_HUMAN |
| Lib2 | N338 | 351 | 2937 | C338 | 698 | 2934 | RBM15_HUMAN |
| Lib2 | N339 | 352 | 1872 | C339 | 699 | 1866 | SPOC1_HUMAN |
| Lib2 | N340 | 353 | 2709 | C340 | 700 | 2706 | FPA_ARATH |
| Lib2 | N341 | 354 | 2466 | C341 | 701 | 2463 | NCOR2_HUMAN |
| Lib2 | N342 | 355 | 2655 | C342 | 702 | 2649 | NCOR2_HUMAN |
| Lib2 | N343 | 356 | 2442 | C343 | 703 | 2439 | NCOR2_HUMAN |
| Lib2 | N344 | 357 | 1290 | C344 | 704 | 1287 | HDAC3_HUMAN |
| Lib2 | N345 | 358 | 429 | C345 | 705 | 426 | MSX2_HUMAN |
| Lib2 | N346 | 359 | 207 | C346 | 706 | 201 | MSX2_HUMAN |
| Lib2 | N347 | 360 | 3168 | C347 | 707 | 3162 | DIDO1_HUMAN |
| Lib2 | N348 | 361 | 1767 | C348 | 708 | 1764 | BRDT_HUMAN |
| Lib2 | N349 | 362 | 840 | C349 | 709 | 837 | DAM_N132A |

TABLE 5
Exemplar Hits from Library 2

| Full_IDs | N | C | Full_Name | log2FoldChange | pvalue |
|---|---|---|---|---|---|
| 25 - 281 | N25 | C281 | CTCFL - VP64 | 4.15049289 | 5.08E−05 |
| 285 - 281 | N285 | C281 | p65-MyoD - VP64 | 4.14655304 | 3.24E−14 |
| 212 - 281 | N212 | C281 | HDAC8_HUMAN - VP64 | 3.65967799 | 8.46E−17 |
| 282 - 257 | N282 | C257 | VP160 - c-Myb-TAD | 3.62466825 | 9.65E−05 |
| 346 - 281 | N346 | C281 | MSX2_HUMAN - VP64 | 3.6004395 | 0.00211514 |
| 284 - 154 | N284 | C154 | p65-HSF1 - NSD2_HUMAN | 3.5618687 | 1.48E−09 |
| 190 - 281 | N190 | C281 | ANM1_HUMAN - VP64 | 3.5573888 | 3.07E−11 |
| 345 - 281 | N345 | C281 | MSX2_HUMAN - VP64 | 3.51582919 | 7.90E−11 |
| 281 - 315 | N281 | C315 | VP64 - NCoR | 3.51344384 | 0.00602017 |
| 285 - 18 | N285 | C18 | p65-MyoD - EZH2 | 3.46569257 | 4.81E−08 |
| 282 - 217 | N282 | C217 | VP160 - CHRC1_HUMAN | 3.41859537 | 2.51E−11 |
| 281 - 269 | N281 | C269 | VP64 - PU.1 | 3.40462175 | 8.32E−09 |
| 282 - 204 | N282 | C204 | VP160 - HIF1N_HUMAN | 3.39151178 | 1.96E−10 |
| 282 - 285 | N282 | C285 | VP160 - p65-MyoD | 3.38505548 | 3.54E−16 |
| 69 - 281 | N69 | C281 | SETB2_HUMAN - VP64 | 3.26337528 | 0.00454037 |
| 282 - 151 | N282 | C151 | VP160 - SIR7_HUMAN | 3.25619642 | 3.00E−07 |
| 317 - 281 | N317 | C281 | HDAC3 - VP64 | 3.22080428 | 2.52E−11 |
| 14 - 281 | N14 | C281 | RELA - VP64 | 3.2189722 | 2.26E−11 |
| 118 - 281 | N118 | C281 | HDAC6_HUMAN - VP64 | 3.21729179 | 1.38E−09 |
| 284 - 281 | N284 | C281 | p65-HSF1 - VP64 | 3.21294873 | 9.75E−10 |
| 322 - 281 | N322 | C281 | MINT_HUMAN - VP64 | 3.1696308 | 2.45E−13 |
| 91 - 281 | N91 | C281 | ANM5_HUMAN - VP64 | 3.15532258 | 7.96E−10 |
| 285 - 1 | N285 | C1 | p65-MyoD - SETD1A | 3.15078628 | 2.52E−14 |
| 281 - 280 | N281 | C280 | VP64 - CBF1-Cterm | 3.14508087 | 0.00829036 |
| 275 - 35 | N275 | C35 | DOT1L-DOT1_domain - | 3.13452827 | 5.02E−10 |
| | | | VPR_JKNp64 | | |
| 282 - 291 | N282 | C291 | VP160 - SS18 | 3.12357008 | 1.28E−12 |
| 284 - 267 | N284 | C267 | p65-HSF1 - FOXA1-Nterm | 3.11716631 | 1.36E−16 |
| 281 - 346 | N281 | C346 | VP64 - MSX2_HUMAN | 3.11054456 | 0.0189031 |
| 284 - 257 | N284 | C257 | p65-HSF1 - c-Myb-TAD | 3.10641044 | 9.21E−14 |
| 284 - 291 | N284 | C291 | p65-HSF1 - SS18 | 3.10151665 | 1.70E−07 |
| 306 - 281 | N306 | C281 | CobB - VP64 | 3.0838466 | 1.03E−09 |
| 339 - 281 | N339 | C281 | SPOC1_HUMAN - VP64 | 3.07365661 | 3.07E−07 |
| 222 - 281 | N222 | C281 | IN80E_HUMAN - VP64 | 3.07320703 | 5.81E−10 |
| 282 - 289 | N282 | C289 | VP160 - FOG1 | 3.0727682 | 0.00103697 |
| 284 - 280 | N284 | C280 | p65-HSF1 - CBF1-Cterm | 3.06468054 | 3.61E−06 |
| 162 - 35 | N162 | C35 | SIR6_HUMAN - | 3.04983874 | 2.02E−06 |
| | | | VPR_JKNp64 | | |
| 327 - 281 | N327 | C281 | hs_NIPP1 - VP64 | 3.04814332 | 1.71E−09 |
| 291 - 281 | N291 | C281 | SS18 - VP64 | 3.04720512 | 9.67E−06 |
| 151 - 281 | N151 | C281 | SIR7_HUMAN - VP64 | 3.03569397 | 9.15E−13 |
| 284 - 345 | N284 | C345 | p65-HSF1 - MSX2_HUMAN | 3.02853994 | 4.74E−06 |
| 281 - 285 | N281 | C285 | VP64 - p65-MyoD | 3.02395619 | 1.20E−11 |
| 297 - 281 | N297 | C281 | MesoLo - VP64 | 3.02283858 | 1.58E−12 |
| 282 - 315 | N282 | C315 | VP160 - NCoR | 3.01852669 | 7.92E−04 |
| 302 -281 | N302 | C281 | HDAC11 - VP64 | 3.01466293 | 2.36E−11 |
| 281 - 284 | N281 | C284 | VP64 - p65-HSF1 | 3.0143236 | 4.40E−11 |
| 154 - 281 | N154 | C281 | NSD2_HUMAN - VP64 | 3.01261589 | 5.12E−06 |
| 116 - 281 | N116 | C281 | ANM6_HUMAN - VP64 | 3.00494884 | 1.09E−07 |
| 285 - 99 | N285 | C99 | p65-MyoD - IN80C_HUMAN | 2.99379637 | 3.75E−10 |
| 164 - 281 | N164 | C281 | SIR5_HUMAN - VP64 | 2.98573061 | 9.96E−13 |
| 5 - 284 | N5 | C284 | KDM1A - p65-HSF1 | 2.9841417 | 2.03E−11 |
| 310 - 281 | N310 | C281 | TgSET8 - VP64 | 2.98174935 | 5.22E−08 |
| 233 - 281 | N233 | C281 | HINFP_HUMAN - VP64 | 2.97621976 | 9.21E−06 |
| 281 - 17 | N281 | C17 | VP64 - EZH2 | 2.96778242 | 4.71E−06 |
| 32 - 281 | N32 | C281 | Gilbert_Lab_CRISPRi_KRAB - | 2.95699143 | 0.0252263 |
| | | | VP64 | | |
| 281 - 278 | N281 | C278 | VP64 - TET2CD | 2.9520877 | 1.32E−09 |
| 282 -106 | N282 | C106 | VP160 - KAT6B_HUMAN | 2.95124009 | 3.14E−16 |
| 285 - 269 | N285 | C269 | p65-MyoD - PU.1 | 2.94786795 | 1.32E−08 |
| 281 - 5 | N281 | C5 | VP64 - KDM1A | 2.94706365 | 3.77E−06 |
| 300 - 281 | N300 | C281 | SIRT6 - VP64 | 2.94395234 | 1.56E−07 |
| 281 - 233 | N281 | C233 | VP64 - HINFP_HUMAN | 2.94137578 | 0.00765982 |
| 194 - 281 | N194 | C281 | ING1_HUMAN - VP64 | 2.93611071 | 7.15E−09 |
| 282 - 284 | N282 | C284 | VP160 - p65-HSF1 | 2.92713716 | 6.23E−15 |
| 284 - 314 | N284 | C314 | p65-HSF1 - MeCP2 | 2.91660605 | 6.91E−08 |
| 284 - 297 | N284 | C297 | p65-HSF1 - MesoLo | 2.91610449 | 3.02E−09 |
| 282 - 165 | N282 | C165 | VP160 - MTA2_HUMAN | 2.89247925 | 9.73E−06 |
| 282 - 346 | N282 | C346 | VP160 - MSX2_HUMAN | 2.88865492 | 0.00673929 |
| 282 - 290 | N282 | C290 | VP160 - HP1aCS | 2.88253485 | 9.58E−12 |
| 281 - 1 | N281 | C1 | VP64 - SETD1A | 2.87821341 | 0.02121545 |
| 73 - 281 | N73 | C281 | KDM5D_HUMAN - VP64 | 2.87005303 | 2.23E−06 |
| 282 - 218 | N282 | C218 | VP160 - IN80B_HUMAN | 2.86415696 | 4.05E−13 |
| 281 - 2 | N281 | C2 | VP64 - SETD1A | 2.85046697 | 2.16E−13 |
| 285 - 17 | N285 | C17 | p65-MyoD - EZH2 | 2.84367118 | 5.38E−07 |
| 197 - 281 | N197 | C281 | SUV91_HUMAN - VP64 | 2.83794687 | 4.76E−11 |
| 205 - 281 | N205 | C281 | JMJD7_HUMAN - VP64 | 2.8362683 | 2.18E−09 |
| 15 - 281 | N15 | C281 | EP300 - VP64 | 2.83532174 | 2.09E−06 |
| 282 - 345 | N282 | C345 | VP160 - MSX2_HUMAN | 2.83500973 | 1.65E−08 |
| 282 - 128 | N282 | C128 | VP160 - HAIR_HUMAN | 2.83414348 | 1.63E−06 |
| 284 - 310 | N284 | C310 | p65-HSF1 - TgSET8 | 2.8223996 | 2.07E−09 |
| 63 - 281 | N63 | C281 | SMYD5_HUMAN - VP64 | 2.82087595 | 1.19E−05 |
| 281 - 290 | N281 | C290 | VP64 - HP1aCS | 2.81778274 | 0.04643734 |
| 285 - 280 | N285 | C280 | p65-MyoD - CBF1-Cterm | 2.80684261 | 1.15E−05 |
| 282 - 269 | N282 | C269 | VP160 - PU.1 | 2.80606212 | 6.86E−11 |
| 282 - 280 | N282 | C280 | VP160 - CBF1-Cterm | 2.80282442 | 2.09E−08 |
| 282 - 314 | N282 | C314 | VP160 - MeCP2 | 2.79014817 | 6.40E−14 |
| 284 - 246 | N284 | C246 | p65-HSF1 - ATRX_HUMAN | 2.78917163 | 5.90E−07 |
| 284 - 313 | N284 | C313 | p65-HSF1 - SaII | 2.78308287 | 1.75E−07 |
| 285 - 291 | N285 | C291 | p65-MyoD - SS18 | 2.77720883 | 8.00E−10 |
| 123 - 35 | N123 | C35 | KMT2A_HUMAN - | 2.77668868 | 3.09E−08 |
| | | | VPR_JKNp64 | | |
| 285 - 233 | N285 | C233 | p65-MyoD - | 2.77392222 | 3.94E−08 |
| | | | HINFP_HUMAN | | |
| 281 - 149 | N281 | C149 | VP64 - MBD1_HUMAN | 2.76852205 | 2.59E−06 |
| 299 - 281 | N299 | C281 | HST2 - VP64 | 2.76763444 | 6.31E−11 |
| 78 - 285 | N78 | C285 | KAT6A_HUMAN - p65- | 2.76543284 | 3.86E−07 |
| | | | MyoD | | |
| 295 - 35 | N295 | C35 | SET-TAF1B - VPR_JKNp64 | 2.7629058 | 1.37E−07 |
| 59 - 281 | N59 | C281 | INO80_HUMAN - VP64 | 2.75885939 | 7.46E−10 |
| 281 - 345 | N281 | C345 | VP64 - MSX2_HUMAN | 2.75848131 | 0.0080578 |
| 135 - 281 | N135 | C281 | KDM2A_HUMAN - VP64 | 2.75679089 | 2.74E−07 |
| 284 - 239 | N284 | C239 | p65-HSF1 - KDM8_HUMAN | 2.75545412 | 1.45E−08 |
| 282 - 192 | N282 | C192 | VP160 - JHD2C_HUMAN | 2.75435431 | 1.72E−05 |
| 282 - 246 | N282 | C246 | VP160 - ATRX_HUMAN | 2.75164016 | 4.87E−09 |
| 284 - 63 | N284 | C63 | p65-HSF1 - | 2.74651564 | 1.41E−08 |
| | | | SMYD5_HUMAN | | |
| 282 - 111 | N282 | C111 | VP160 - KDM5A_HUMAN | 2.74546328 | 0.00619723 |
| 282 - 164 | N282 | C164 | VP160 - SIR5_HUMAN | 2.7443568 | 8.68E−15 |
| 93 - 281 | N93 | C281 | ACL6B_HUMAN - VP64 | 2.73873156 | 2.26E−08 |
| 282 - 78 | N282 | C78 | VP160 - KAT6A_HUMAN | 2.7332012 | 1.28E−10 |
| 27 - 281 | N27 | C281 | EZH1 - VP64 | 2.73046777 | 2.28E−10 |
| 281 - 116 | N281 | C116 | VP64 - ANM6_HUMAN | 2.72792321 | 2.21E−09 |
| 281 - 172 | N281 | C172 | VP64 - ASH1L_HUMAN | 2.72699841 | 5.70E−06 |
| 14 - 257 | N14 | C257 | RELA - c-Myb-TAD | 2.7253311 | 4.89E−09 |
| 61 - 281 | N61 | C281 | HAT1_HUMAN - VP64 | 2.72376845 | 3.56E−06 |
| 282 - 116 | N282 | C116 | VP160 - ANM6_HUMAN | 2.72281514 | 1.29E−13 |
| 282 - 226 | N282 | C226 | VP160 - SETD2_HUMAN | 2.72224372 | 1.25E−12 |
| 35 - 14 | N35 | C14 | VPR_JKNp64 - RELA | 2.72187198 | 9.16E−05 |
| 281 - 35 | N281 | C35 | VP64 - VPR_JKNp64 | 2.71628132 | 1.28E−08 |
| 282 - 227 | N282 | C227 | VP160 - SIR1_HUMAN | 2.71411227 | 6.74E−06 |
| 138 - 284 | N138 | C284 | TFPT_HUMAN - p65-HSF1 | 2.70984378 | 7.75E−06 |
| 282 - 198 | N282 | C198 | VP160 - JMJD8_HUMAN | 2.70959931 | 2.30E−10 |
| 99 - 35 | N99 | C35 | IN80C_HUMAN - | 2.70847321 | 8.64E−05 |
| | | | VPR_JKNp64 | | |
| 284 - 294 | N284 | C294 | p65-HSF1 - DIM5 | 2.70584304 | 9.73E−10 |
| 164 - 35 | N164 | C35 | SIR5_HUMAN - | 2.70304098 | 1.24E−06 |
| | | | VPR_JKNp64 | | |
| 284 - 99 | N284 | C99 | p65-HSF1 - IN80C_HUMAN | 2.70302654 | 5.13E−06 |
| 35 - 1 | N35 | C1 | VPR_JKNp64 - SETD1A | 2.69839543 | 1.76E−07 |
| 186 - 35 | N186 | C35 | RIOX2_HUMAN - | 2.69576566 | 1.78E−06 |
| | | | VPR_JKNp64 | | |
| 206 - 281 | N206 | C281 | SETD9_HUMAN - VP64 | 2.68722228 | 1.95E−06 |
| 245 - 281 | N245 | C281 | TYY1_HUMAN - VP64 | 2.68575964 | 2.25E−06 |
| 282 - 9 | N282 | C9 | VP160 - MECP2 | 2.68537809 | 2.89E−13 |
| 270 - 281 | N270 | C281 | ENL - VP64 | 2.68254141 | 1.25E−05 |
| 218 - 281 | N218 | C281 | IN80B_HUMAN - VP64 | 2.68150535 | 7.00E−07 |
| 281 - 218 | N281 | C218 | VP64 - IN80B_HUMAN | 2.68098205 | 2.84E−11 |
| 281 - 313 | N281 | C313 | VP64 - SaII | 2.6809743 | 0.03932104 |
| 284 - 135 | N284 | C135 | p65-HSF1 - | 2.68088458 | 4.21E−06 |
| | | | KDM2A_HUMAN | | |
| 285 - 331 | N285 | C331 | p65-MyoD - mm_G9a | 2.68045181 | 5.79E−06 |
| 282 - 176 | N282 | C176 | VP160 - ARP8_HUMAN | 2.67740061 | 4.05E−07 |
| 154 - 284 | N154 | C284 | NSD2_HUMAN - p65-HSF1 | 2.6772012 | 2.50E−08 |
| 285 - 8 | N285 | C8 | p65-MyoD - MECP2 | 2.67372976 | 9.98E−07 |
| 273 - 35 | N273 | C35 | PRDM9-CD - VPR_JKNp64 | 2.66787454 | 9.43E−07 |
| 216 - 284 | N216 | C284 | ING5_HUMAN - p65-HSF1 | 2.66597539 | 1.22E−06 |
| 282 - 24 | N282 | C24 | VP160 - CTCFL | 2.66025868 | 9.88E−08 |
| 162- 281 | N162 | C281 | SIR6_HUMAN - VP64 | 2.66001709 | 1.97E−08 |
| 345 - 284 | N345 | C284 | MSX2_HUMAN - p65-HSF1 | 2.65990945 | 4.41E−08 |
| 17 - 284 | N17 | C284 | EZH2 - p65-HSF1 | 2.65311997 | 1.73E−09 |
| 35 - 106 | N35 | C106 | VPR_JKNp64 - | 2.65008307 | 1.24E−09 |
| | | | KAT6B_HUMAN | | |
| 93 - 35 | N93 | C35 | ACL6B_HUMAN - | 2.64954943 | 1.35E−04 |
| | | | VPR_JKNp64 | | |
| 284 - 164 | N284 | C164 | p65-HSF1 - SIR5_HUMAN | 2.64708743 | 3.93E−06 |
| 281 - 66 | N281 | C66 | VP64 - DOT1L_HUMAN | 2.64586281 | 2.00E−11 |
| 266 - 281 | N266 | C281 | GADD45A - VP64 | 2.64044921 | 9.80E−06 |
| 18 - 281 | N18 | C281 | EZH2 - VP64 | 2.63981717 | 4.53E−08 |
| 281 - 291 | N281 | C291 | VP64 - SS18 | 2.63867198 | 4.90E−11 |
| 14 - 285 | N14 | C285 | RELA - p65-MyoD | 2.63768123 | 2.93E−06 |
| 112 - 281 | N112 | C281 | KDM5A_HUMAN - VP64 | 2.63553421 | 1.39E−10 |
| 282 - 212 | N282 | C212 | VP160 - HDAC8_HUMAN | 2.63519868 | 2.05E−07 |
| 315 - 35 | N315 | C35 | NCOR - VPR_JKNp64 | 2.63489284 | 2.12E−06 |
| 282 - 131 | N282 | C131 | VP160 - PRDM2_HUMAN | 2.63412752 | 8.42E−13 |
| 284 - 47 | N284 | C47 | p65-HSF1 - ANM2_HUMAN | 2.63355415 | 8.03E−06 |
| 166 - 284 | N166 | C284 | EHMT1_HUMAN - p65- | 2.63200795 | 4.33E−06 |
| | | | HSF1 | | |
| 282 - 14 | N282 | C14 | VP160 - RELA | 2.62789577 | 8.10E−13 |
| 282 - 52 | N282 | C52 | VP160 - CBP_HUMAN | 2.62436076 | 7.50E−10 |
| 313 - 35 | N313 | C35 | SaII - VPR_JKNp64 | 2.62254208 | 1.09E−09 |
| 282 - 38 | N282 | C38 | VP160 - EHMT2 | 2.62129505 | 9.77E−09 |
| 282 - 73 | N282 | C73 | VP160 - KDM5D_HUMAN | 2.61961629 | 8.70E−06 |
| 222 - 35 | N222 | C35 | IN80E_HUMAN - | 2.61840476 | 2.16E−06 |
| | | | VPR_JKNp64 | | |
| 284 - 106 | N284 | C106 | p65-HSF1 - | 2.61810906 | 2.54E−06 |
| | | | KAT6B_HUMAN | | |
| 35 - 63 | N35 | C63 | VPR_JKNp64 - | 2.61758698 | 8.36E−06 |
| | | | SMYD5_HUMAN | | |
| 282 - 123 | N282 | C123 | VP160 - KMT2A_HUMAN | 2.61646413 | 3.50E−10 |
| 280 - 35 | N280 | C35 | CBF1-Cterm - VPR_JKNp64 | 2.61619328 | 5.06E−09 |
| 282 - 50 | N282 | C50 | VP160 - NCOA1_HUMAN | 2.61560995 | 8.34E−09 |
| 282 - 313 | N282 | C313 | VP160 - SaII | 2.61503985 | 0.00788452 |
| 240 - 35 | N240 | C35 | ANM3_HUMAN - | 2.61404769 | 8.09E−05 |
| | | | VPR_JKNp64 | | |
| 49 - 281 | N49 | C281 | NCOA1_HUMAN - VP64 | 2.61101349 | 2.88E−05 |
| 282 - 299 | N282 | C299 | VP160 - HST2 | 2.60920978 | 2.33E−12 |
| 282 - 35 | N282 | C35 | VP160 - VPR_JKNp64 | 2.60336047 | 1.50E−07 |
| 186 - 284 | N186 | C284 | RIOX2_HUMAN - p65-HSF1 | 2.6008869 | 1.68E−09 |
| 281 - 268 | N281 | C268 | VP64 - FOXA1-Cterm | 2.59867323 | 9.04E−07 |
| 281 - 252 | N281 | C252 | VP64 - HCFC1_HUMAN | 2.59804204 | 3.28E−09 |
| 78 - 284 | N78 | C284 | KAT6A_HUMAN - p65- | 2.59515272 | 2.12E−09 |
| | | | HSF1 | | |
| 282 - 245 | N282 | C245 | VP160 - TYY1_HUMAN | 2.58769133 | 7.95E−08 |
| 114 - 284 | N114 | C284 | KDM5A_HUMAN - p65- | 2.57740362 | 5.26E−07 |
| | | | HSF1 | | |
| 281 - 15 | N281 | C15 | VP64 - EP300 | 2.57447676 | 1.12E−05 |
| 284 - 5 | N284 | C5 | p65-HSF1 - KDM1A | 2.57422956 | 3.53E−10 |
| 284 - 252 | N284 | C252 | p65-HSF1 - | 2.57314015 | 4.38E−05 |
| | | | HCFC1_HUMAN | | |
| 285 - 267 | N285 | C267 | p65-MyoD - FOXA1-Nterm | 2.57246203 | 2.45E−11 |
| 164 - 284 | N164 | C284 | SIR5_HUMAN - p65-HSF1 | 2.5704686 | 2.51E−06 |
| 281 - 10 | N281 | C10 | VP64 - HSF1 | 2.56634244 | 4.71E−11 |
| 144 - 281 | N144 | C281 | UTY_HUMAN - VP64 | 2.56629277 | 1.18E−04 |
| 282 - 298 | N282 | C298 | VP160 - MBD2b | 2.56585318 | 9.00E−14 |
| 282 - 233 | N282 | C233 | VP160 - HINFP_HUMAN | 2.56264986 | 5.28E−08 |
| 217 - 35 | N217 | C35 | CHRC1_HUMAN - | 2.56223041 | 4.31E−07 |
| | | | VPR_JKNp64 | | |
| 282 - 15 | N282 | C15 | VP160 - EP300 | 2.56179053 | 7.45E−11 |
| 282 - 17 | N282 | C17 | VP160 - EZH2 | 2.5589909 | 1.56E−08 |
| 273 - 281 | N273 | C281 | PRDM9-CD - VP64 | 2.55779896 | 5.21E−06 |
| 108 - 281 | N108 | C281 | KAT6B_HUMAN - VP64 | 2.55570931 | 1.50E−08 |
| 282 - 99 | N282 | C99 | VP160 - IN80C_HUMAN | 2.55184108 | 7.35E−11 |
| 282 - 239 | N282 | C239 | VP160 - KDM8_HUMAN | 2.54546274 | 6.43E−11 |
| 282 - 251 | N282 | C251 | VP160 - HCFC1_HUMAN | 2.54489169 | 6.03E−05 |
| 270 - 284 | N270 | C284 | ENL - p65-HSF1 | 2.54275435 | 1.76E−06 |
| 281 - 328 | N281 | C328 | VP64 - hs_PHF19 | 2.54245579 | 2.80E−08 |
| 284 - 332 | N284 | C332 | p65-HSF1 - hs_SIRT5 | 2.54128651 | 3.63E−06 |
| 106 - 281 | N106 | C281 | KAT6B_HUMAN - VP64 | 2.54107723 | 1.58E−07 |
| 282 - 281 | N282 | C281 | VP160 - VP64 | 2.54023976 | 5.94E−06 |
| 284 - 269 | N284 | C269 | p65-HSF1 - PU.1 | 2.53988937 | 1.08E−11 |
| 91 - 285 | N91 | C285 | ANM5_HUMAN - p65-MyoD | 2.53743604 | 1.25E−04 |
| 282 - 288 | N282 | C288 | VP160 - SUV[SET] | 2.53605349 | 1.37E−09 |
| 282 - 83 | N282 | C83 | VP160 - SMRD3_HUMAN | 2.53529775 | 2.19E−07 |
| 12 - 281 | N12 | C281 | KMT2A - VP64 | 2.53473909 | 7.77E−08 |
| 282 - 252 | N282 | C252 | VP160 - HCFC1_HUMAN | 2.52598846 | 4.68E−10 |
| 281 - 246 | N281 | C246 | VP64 - ATRX_HUMAN | 2.52568151 | 0.01052136 |
| 233 - 284 | N233 | C284 | HINFP_HUMAN - p65-HSF1 | 2.52252034 | 2.37E−09 |
| 282 - 214 | N282 | C214 | VP160 - HDAC4_HUMAN | 2.52063206 | 5.78E−08 |
| 285 - 63 | N285 | C63 | p65-MyoD - | 2.51910082 | 5.18E−08 |
| | | | SMYD5_HUMAN | | |
| 220 - 281 | N220 | C281 | JARD2_HUMAN - VP64 | 2.51496582 | 6.94E−05 |
| 280 - 281 | N280 | C281 | CBF1-Cterm - VP64 | 2.51015231 | 0.03015865 |
| 275 - 281 | N275 | C281 | DOT1L-DOT1_domain - | 2.51008485 | 1.48E−07 |
| | | | VP64 | | |
| 282 - 102 | N282 | C102 | VP160 - TAF1_HUMAN | 2.50934624 | 5.99E−09 |
| 282 - 295 | N282 | C295 | VP160 - SET-TAF1B | 2.50923113 | 3.38E−11 |
| 281 - 78 | N281 | C78 | VP64 - KAT6A_HUMAN | 2.50857066 | 4.96E−08 |
| 250 - 281 | N250 | C281 | HCFC1_HUMAN - VP64 | 2.50851306 | 3.65E−04 |
| 282 - 5 | N282 | C5 | VP160 - KDM1A | 2.50606406 | 1.25E−06 |
| 282 - 162 | N282 | C162 | VP160 - SIR6_HUMAN | 2.50553106 | 1.55E−10 |
| 281 - 47 | N281 | C47 | VP64 - ANM2_HUMAN | 2.50389568 | 1.53E−07 |
| 284 - 162 | N284 | C162 | p65-HSF1 - SIR6_HUMAN | 2.50286997 | 1.75E−07 |
| 77 - 284 | N77 | C284 | KDM5D_HUMAN - p65- | 2.50238752 | 3.01E−06 |
| | | | HSF1 | | |
| 282 - 294 | N282 | C294 | VP160 - DIM5 | 2.50143678 | 2.04E−12 |
| 284 - 249 | N284 | C249 | p65-HSF1 - HAC1-HAT | 2.50049495 | 3.57E−09 |
| 308 - 281 | N308 | C281 | HDT1 - VP64 | 2.49968864 | 3.29E−06 |
| 282 - 25 | N282 | C25 | VP160 - CTCFL | 2.49913717 | 0.02694462 |
| 194 - 284 | N194 | C284 | ING1_HUMAN - p65-HSF1 | 2.49845849 | 1.83E−07 |
| 282 - 275 | N282 | C275 | VP160 - DOT1L- | 2.49522308 | 7.32E−12 |
| | | | DOT1_domain | | |
| 285 - 218 | N285 | C218 | p65-MyoD - IN80B_HUMAN | 2.49481499 | 1.76E−05 |
| 284 - 69 | N284 | C69 | p65-HSF1 - SETB2_HUMAN | 2.49427424 | 1.15E−06 |
| 285 - 315 | N285 | C315 | p65-MyoD - NCOR | 2.4891583 | 3.82E−08 |
| 308 - 35 | N308 | C35 | HDT1 - VPR_JKNp64 | 2.48854565 | 1.46E−08 |
| 281 - 239 | N281 | C239 | VP64 - KDM8_HUMAN | 2.48500156 | 1.09E−10 |
| 284 - 78 | N284 | C78 | p65-HSF1 - | 2.48403777 | 1.07E−08 |
| | | | KAT6A_HUMAN | | |
| 285 - 45 | N285 | C45 | p65-MyoD - | 2.47975749 | 4.80E−05 |
| | | | KMT2D_HUMAN | | |
| 282 - 213 | N282 | C213 | VP160 - HBAP1_HUMAN | 2.47768866 | 5.04E−07 |
| 284 - 25 | N284 | C25 | p65-HSF1 - CTCFL | 2.47632 | 1.05E−04 |
| 282 - 156 | N282 | C156 | VP160 - A7E2E1_HUMAN | 2.47435824 | 2.42E−05 |
| 285 - 199 | N285 | C199 | p65-MyoD - ING3_HUMAN | 2.4741407 | 2.60E−04 |
| 282 - 173 | N282 | C173 | VP160 - SIR4_HUMAN | 2.47399655 | 1.62E−09 |
| 285 - 249 | N285 | C249 | p65-MyoD - HAC1-HAT | 2.47362395 | 8.57E−07 |
| 38 - 35 | N38 | C35 | EHMT2 - VPR_JKNp64 | 2.47117354 | 1.58E−05 |
| 282 - 68 | N282 | C68 | VP160 - MBD3_HUMAN | 2.47073731 | 6.24E−10 |
| 18 - 284 | N18 | C284 | EZH2 - p65-HSF1 | 2.46919218 | 4.68E−09 |
| 282 - 101 | N282 | C101 | VP160 - TAF1_HUMAN | 2.46741765 | 2.47E−10 |
| 284 - 315 | N284 | C315 | p65-HSF1 - NCoR | 2.46271116 | 2.39E−10 |
| 282 - 20 | N282 | C20 | VP160 - KDM1B | 2.46261072 | 6.31E−12 |
| 6 - 281 | N6 | C281 | KDM1A - VP64 | 2.46159087 | 7.32E−08 |
| 281 - 327 | N281 | C327 | VP64 - hs_NIPP1 | 2.46029115 | 3.28E−10 |
| 284 - 233 | N284 | C233 | p65-HSF1 - HINFP_HUMAN | 2.45654845 | 7.57E−07 |
| 216 - 35 | N216 | C35 | ING5_HUMAN - | 2.45541661 | 4.05E−06 |
| | | | VPR_JKNp64 | | |
| 246 - 239 | N246 | C239 | ATRX_HUMAN - | 2.45474969 | 7.18E−05 |
| | | | KDM8_HUMAN | | |
| 282 - 266 | N282 | C266 | VP160 - GADD45A | 2.45408854 | 1.22E−08 |
| 282 - 84 | N282 | C84 | VP160 - IN80D_HUMAN | 2.45310034 | 5.46E−05 |
| 282 - 12 | N282 | C12 | VP160 - KMT2A | 2.45167882 | 5.16E−12 |
| 282 - 250 | N282 | C250 | VP160 - HCFC1_HUMAN | 2.44960867 | 8.56E−11 |
| 285 - 257 | N285 | C257 | p65-MyoD - c-Myb-TAD | 2.44860557 | 2.47E−07 |
| 281 - 319 | N281 | C319 | VP64 - mCBP-HAT | 2.44839884 | 6.92E−05 |
| 136 - 281 | N136 | C281 | JMJD6_HUMAN - VP64 | 2.44792533 | 2.82E−05 |
| 134 - 281 | N134 | C281 | KDM2A_HUMAN - VP64 | 2.44760442 | 4.10E−07 |
| 281 - 26 | N281 | C26 | VP64 - EZH1 | 2.44602433 | 2.20E−05 |
| 282 - 148 | N282 | C148 | VP160 - NSD3_HUMAN | 2.4459255 | 9.59E−08 |
| 282 - 308 | N282 | C308 | VP160 - HDT1 | 2.44563357 | 2.74E−07 |
| 38 - 285 | N38 | C285 | EHMT2 - p65-MyoD | 2.44245026 | 9.61E−06 |
| 282 - 140 | N282 | C140 | VP160 - KDM6B_HUMAN | 2.44030819 | 5.98E−07 |
| 284 - 8 | N284 | C8 | p65-HSF1 - MECP2 | 2.43914721 | 1.16E−07 |
| 284 - 17 | N284 | C17 | p65-HSF1 - EZH2 | 2.43817423 | 2.96E−07 |
| 15 - 257 | N15 | C257 | EP300 - c-Myb-TAD | 2.43692842 | 4.10E−04 |
| 344 - 281 | N344 | C281 | HDAC3_HUMAN - VP64 | 2.43688415 | 2.18E−08 |
| 24 - 281 | N24 | C281 | CTCFL - VP64 | 2.43381249 | 5.58E−07 |
| 281 - 250 | N281 | C250 | VP64 - HCFC1_HUMAN | 2.43111827 | 1.34E−10 |
| 233 - 35 | N233 | C35 | HINFP_HUMAN - | 2.43092447 | 2.01E−06 |
| | | | VPR_JKNp64 | | |
| 296 - 35 | N296 | C35 | HP1a - VPR_JKNp64 | 2.43090457 | 2.27E−09 |
| 35 - 289 | N35 | C289 | VPR_JKNp64 - FOG1 | 2.43031245 | 4.94E−07 |
| 106 - 284 | N106 | C284 | KAT6B_HUMAN - p65- | 2.42932298 | 4.44E−07 |
| | | | HSF1 | | |
| 281 - 128 | N281 | C128 | VP64 - HAIR_HUMAN | 2.42723807 | 3.74E−05 |
| 281 - 266 | N281 | C266 | VP64 - GADD45A | 2.42686674 | 4.96E−05 |
| 282 - 301 | N282 | C301 | VP160 - SIRT3 | 2.42311735 | 8.89E−10 |
| 284 - 226 | N284 | C226 | p65-HSF1 - SETD2_HUMAN | 2.42051784 | 3.87E−04 |
| 282 - 268 | N282 | C268 | VP160 - FOXA1-Cterm | 2.42020028 | 6.16E−09 |
| 18 - 14 | N18 | C14 | EZH2 - RELA | 2.41997159 | 2.10E−06 |
| 282 - 8 | N282 | C8 | VP160 - MECP2 | 2.41888341 | 0.01725547 |
| 284 - 120 | N284 | C120 | p65-HSF1 - RING1_HUMAN | 2.41655813 | 4.78E−05 |
| 284 - 255 | N284 | C255 | p65-HSF1 - EED_HUMAN | 2.41629307 | 3.52E−05 |
| 339 - 284 | N339 | C284 | SPOC1_HUMAN - p65-HSF1 | 2.41419161 | 2.12E−07 |
| 284 - 222 | N284 | C222 | p65-HSF1 - IN80E_HUMAN | 2.41373102 | 9.15E−05 |
| 282 - 297 | N282 | C297 | VP160 - MesoLo | 2.41190571 | 2.38E−11 |
| 282 - 175 | N282 | C175 | VP160 - RUVB2_HUMAN | 2.40635756 | 4.18E−05 |
| 281 - 205 | N281 | C205 | VP64 - JMJD7_HUMAN | 2.40585323 | 4.54E−07 |
| 284 - 296 | N284 | C296 | p65-HSF1 - HP1a | 2.40571631 | 3.40E−06 |
| 281 - 63 | N281 | C63 | VP64 - SMYD5_HUMAN | 2.40151381 | 8.19E−09 |
| 285 - 108 | N285 | C108 | p65-MyoD - | 2.39830565 | 3.82E−04 |
| | | | KAT6B_HUMAN | | |
| 295 - 284 | N295 | C284 | SET-TAF1B - p65-HSF1 | 2.39737159 | 6.22E−07 |
| 281 - 162 | N281 | C162 | VP64 - SIR6_HUMAN | 2.39690963 | 9.43E−09 |
| 188 - 281 | N188 | C281 | SMYD4_HUMAN - VP64 | 2.3969055 | 1.89E−07 |
| 281 - 226 | N281 | C226 | VP64 - SETD2_HUMAN | 2.39244881 | 2.31E−05 |
| 282 - 267 | N282 | C267 | VP160 - FOXA1-Nterm | 2.39144748 | 4.32E−06 |
| 284 - 299 | N284 | C299 | p65-HSF1 - HST2 | 2.39013431 | 8.31E−07 |
| 282 - 69 | N282 | C69 | VP160 - SETB2_HUMAN | 2.38574983 | 1.89E−07 |
| 282 - 174 | N282 | C174 | VP160 - HDAC1_HUMAN | 2.3845532 | 5.48E−05 |
| 280 - 284 | N280 | C284 | CBF1-Cterm - p65-HSF1 | 2.38436452 | 2.31E−07 |
| 282 - 339 | N282 | C339 | VP160 - SPOC1_HUMAN | 2.38310497 | 1.36E−08 |
| 282 - 310 | N282 | C310 | VP160 - TgSET8 | 2.37863427 | 5.65E−10 |
| 106 - 285 | N106 | C285 | KAT6B_HUMAN - p65- | 2.37771894 | 1.94E−09 |
| | | | MyoD | | |
| 281 - 106 | N281 | C106 | VP64 - KAT6B_HUMAN | 2.37504576 | 5.83E−06 |
| 281 - 275 | N281 | C275 | VP64 - DOT1L- | 2.37437945 | 3.17E−09 |
| | | | DOT1_domain | | |
| 285 - 290 | N285 | C290 | p65-MyoD - HP1aCS | 2.37271098 | 2.14E−10 |
| 281 - 77 | N281 | C77 | VP64 - KDM5D_HUMAN | 2.37177561 | 6.37E−08 |
| 297 - 285 | N297 | C285 | MesoLo - p65-MyoD | 2.37086474 | 5.54E−06 |
| 282 - 95 | N282 | C95 | VP160 - SETD6_HUMAN | 2.36904949 | 1.61E−07 |
| 282 - 2 | N282 | C2 | VP160 - SETD1A | 2.36903449 | 4.43E−09 |
| 313 - 284 | N313 | C284 | SaII - p65-HSF1 | 2.3683689 | 3.53E−05 |
| 100 - 35 | N100 | C35 | TAF1_HUMAN - | 2.36781725 | 1.63E−04 |
| | | | VPR_JKNp64 | | |
| 35 - 313 | N35 | C313 | VPR_JKNp64 - SaII | 2.3654483 | 2.38E−09 |
| 282 - 154 | N282 | C154 | VP160 - NSD2_HUMAN | 2.36433715 | 3.15E−11 |
| 282 - 255 | N282 | C255 | VP160 - EED_HUMAN | 2.36389865 | 1.78E−10 |
| 281 - 200 | N281 | C200 | VP64 - ARP5_HUMAN | 2.3634855 | 3.69E−08 |
| 282 - 144 | N282 | C144 | VP160 - UTY_HUMAN | 2.36172966 | 1.48E−04 |
| 151 - 285 | N151 | C285 | SIR7_HUMAN - p65-MyoD | 2.36103329 | 1.47E−07 |
| 287 - 281 | N287 | C281 | G9A[SET] - VP64 | 2.3608579 | 3.26E−08 |
| 282 - 341 | N282 | C341 | VP160 - NCOR2_HUMAN | 2.35986047 | 7.97E−07 |
| 35 - 199 | N35 | C199 | VPR_JKNp64 - | 2.35882111 | 4.63E−04 |
| | | | ING3_HUMAN | | |
| 282 - 209 | N282 | C209 | VP160 - HDA10_HUMAN | 2.35789914 | 5.75E−09 |
| 312 - 281 | N312 | C281 | SetD8 - VP64 | 2.3572263 | 1.39E−06 |
| 35 - 269 | N35 | C269 | VPR_JKNp64 - PU.1 | 2.356532 | 9.78E−07 |
| 281 - 199 | N281 | C199 | VP64 - ING3_HUMAN | 2.35589673 | 8.76E−09 |
| 282 - 306 | N282 | C306 | VP160 - CobB | 2.35551229 | 1.25E−10 |
| 67 - 35 | N67 | C35 | PRDM9_HUMAN - | 2.35094186 | 3.87E−04 |
| | | | VPR_JKNp64 | | |
| 88 - 281 | N88 | C281 | ING4_HUMAN - VP64 | 2.35084197 | 8.29E−07 |
| 281 - 216 | N281 | C216 | VP64 - ING5_HUMAN | 2.3498918 | 8.95E−06 |
| 306 - 284 | N306 | C284 | CobB - p65-HSF1 | 2.34957576 | 1.03E−05 |
| 281 - 110 | N281 | C110 | VP64 - JMJD4_HUMAN | 2.34931303 | 6.36E−09 |
| 282 - 1 | N282 | C1 | VP160 - SETD1A | 2.34830052 | 0.00917087 |
| 281 - 201 | N281 | C201 | VP64 - KDM2B_HUMAN | 2.34758723 | 1.04E−04 |
| 282 - 10 | N282 | C10 | VP160 - HSF1 | 2.3460786 | 5.34E−09 |
| 346 - 35 | N346 | C35 | MSX2_HUMAN - | 2.34589432 | 1.70E−08 |
| | | | VPR_JKNp64 | | |
| 281 - 237 | N281 | C237 | VP64 - KAT5_HUMAN | 2.34572811 | 1.05E−05 |
| 284 - 10 | N284 | C10 | p65-HSF1 - HSF1 | 2.34448019 | 8.37E−04 |
| 35 - 218 | N35 | C218 | VPR_JKNp64 - | 2.34374481 | 4.75E−05 |
| | | | IN80B_HUMAN | | |
| 281 - 99 | N281 | C99 | VP64 - IN80C_HUMAN | 2.34205527 | 1.47E−06 |
| 42 - 281 | N42 | C281 | KMT2E_HUMAN - VP64 | 2.3389117 | 1.31E−07 |
| 282 - 27 | N282 | C27 | VP160 - EZH1 | 2.33807108 | 7.25E−11 |
| 174 - 281 | N174 | C281 | HDAC1_HUMAN - VP64 | 2.33597295 | 5.79E−07 |
| 282 - 56 | N282 | C56 | VP160 - SUV92_HUMAN | 2.33595238 | 5.58E−11 |
| 282 - 119 | N282 | C119 | VP160 - ACL6A_HUMAN | 2.33345055 | 2.21E−06 |
| 282 - 158 | N282 | C158 | VP160 - SETB1_HUMAN | 2.33150068 | 7.46E−05 |
| 281 - 190 | N281 | C190 | VP64 - ANM1_HUMAN | 2.32755942 | 2.59E−10 |
| 281 - 296 | N281 | C296 | VP64 - HP1a | 2.3264389 | 0.02195761 |
| 9 - 35 | N9 | C35 | MECP2 - VPR_JKNp64 | 2.32471582 | 2.73E−07 |
| 282 - 300 | N282 | C300 | VP160 - SIRT6 | 2.32436031 | 1.17E−10 |
| 2 - 281 | N2 | C281 | SETD1A - VP64 | 2.3234311 | 3.11E−04 |
| 99 - 281 | N99 | C281 | IN80C_HUMAN - VP64 | 2.32161407 | 1.12E−05 |
| 282 - 18 | N282 | C18 | VP160 - EZH2 | 2.3194372 | 1.32E−07 |
| 281 - 48 | N281 | C48 | VP64 - SETD5_HUMAN | 2.31730701 | 0.03666156 |
| 282 - 334 | N282 | C334 | VP160 - hs_RCOR1 | 2.31542994 | 2.95E−07 |
| 281 - 331 | N281 | C331 | VP64 - mm_G9a | 2.3145323 | 3.41E−09 |
| 284 - 98 | N284 | C98 | p65-HSF1 - | 2.31428435 | 1.19E−04 |
| | | | A4FU79_HUMAN | | |
| 200 - 99 | N200 | C99 | ARP5_HUMAN - | 2.31374165 | 2.11E−04 |
| | | | IN80C_HUMAN | | |
| 154 - 285 | N154 | C285 | NSD2_HUMAN - p65-MyoD | 2.31317635 | 1.43E−04 |
| 285 - 345 | N285 | C345 | p65-MyoD - MSX2_HUMAN | 2.3129054 | 9.41E−10 |
| 282 - 113 | N282 | C113 | VP160 - KDM5A_HUMAN | 2.3118538 | 7.92E−06 |
| 285 - 332 | N285 | C332 | p65-MyoD - hs_SIRT5 | 2.31144538 | 5.13E−05 |
| 284 - 288 | N284 | C288 | p65-HSF1 - SUV[SET] | 2.31002232 | 1.05E−04 |
| 282 - 45 | N282 | C45 | VP160 - KMT2D_HUMAN | 2.30870069 | 1.63E−09 |
| 282 - 349 | N282 | C349 | VP160 - DAM_N132A | 2.30786245 | 8.91E−10 |
| 281 - 221 | N281 | C221 | VP64 - SMYD2_HUMAN | 2.30127822 | 4.72E−06 |
| 281 - 129 | N281 | C129 | VP64 - HAIR_HUMAN | 2.30060611 | 1.71E−06 |
| 282 - 138 | N282 | C138 | VP160 - TFPT_HUMAN | 2.29824211 | 5.76E−10 |
| 282 - 215 | N282 | C215 | VP160 - HDAC4_HUMAN | 2.29452894 | 8.92E−06 |
| 281 - 309 | N281 | C309 | VP64 - HDAC8 | 2.29218206 | 8.26E−09 |
| 28 - 285 | N28 | C285 | EHMT2 - p65-MyoD | 2.28968877 | 1.56E−04 |
| 310 - 285 | N310 | C285 | TgSET8 - p65-MyoD | 2.2848314 | 3.98E−07 |
| 281 - 253 | N281 | C253 | VP64 - RBBP5_HUMAN | 2.28457316 | 8.40E−06 |
| 284 - 212 | N284 | C212 | p65-HSF1 - | 2.28442652 | 9.74E−08 |
| | | | HDAC8_HUMAN | | |
| 282 - 29 | N282 | C29 | VP160 - ASH2L | 2.28055267 | 0.00014668 |
| 14 - 308 | N14 | C308 | RELA - HDT1 | 2.2796922 | 1.52E−07 |
| 285 - 66 | N285 | C66 | p65-MyoD - | 2.27898531 | 2.76E−05 |
| | | | DOT1L_HUMAN | | |
| 304 - 281 | N304 | C281 | DNMT3a - VP64 | 2.27885885 | 1.07E−04 |
| 281 - 56 | N281 | C56 | VP64 - SUV92_HUMAN | 2.27489262 | 1.35E−06 |
| 222 - 284 | N222 | C284 | IN80E_HUMAN - p65-HSF1 | 2.2711804 | 5.58E−05 |
| 32 - 35 | N32 | C35 | Gilbert_Lab_CRISPRi_KRAB - | 2.27077555 | 3.17E−04 |
| | | | VPR_JKNp64 | | |
| 285 - 317 | N285 | C317 | p65-MyoD - HDAC3 | 2.26832612 | 6.41E−08 |
| 282 - 77 | N282 | C77 | VP160 - KDM5D_HUMAN | 2.26628276 | 4.60E−08 |
| 282 - 127 | N282 | C127 | VP160 - SETMR_HUMAN | 2.26450261 | 5.03E−10 |
| 282 - 278 | N282 | C278 | VP160 - TET2CD | 2.26449667 | 2.65E−05 |
| 212 - 285 | N212 | C285 | HDAC8_HUMAN - p65- | 2.2638459 | 4.88E−08 |
| | | | MyoD | | |
| 281 - 156 | N281 | C156 | VP64 - A7E2E1_HUMAN | 2.26241231 | 1.92E−04 |
| 282 - 150 | N282 | C150 | VP160 - HDA11_HUMAN | 2.26230285 | 1.29E−08 |
| 14 - 99 | N14 | C99 | RELA - IN80C_HUMAN | 2.26114765 | 1.37E−07 |
| 281 - 229 | N281 | C229 | VP64 - NFRKB_HUMAN | 2.25621282 | 3.82E−07 |
| 284 - 219 | N284 | C219 | p65-HSF1 - JARD2_HUMAN | 2.25610143 | 1.52E−08 |
| 281 - 100 | N281 | C100 | VP64 - TAF1_HUMAN | 2.2557008 | 7.36E−06 |
| 282 - 36 | N282 | C36 | VP160 - TET1CD_JKNp84 | 2.25299953 | 1.12E−07 |
| 5 - 285 | N5 | C285 | KDM1A - p65-MyoD | 2.24908377 | 1.22E−05 |
| 281 - 134 | N281 | C134 | VP64 - KDM2A_HUMAN | 2.24866378 | 1.25E−05 |
| 282 - 186 | N282 | C186 | VP160 - RIOX2_HUMAN | 2.24827011 | 1.01E−09 |
| 284 - 1 | N284 | C1 | p65-HSF1 - SETD1A | 2.24537787 | 3.08E−05 |
| 281 - 154 | N281 | C154 | VP64 - NSD2_HUMAN | 2.24533297 | 3.98E−10 |
| 173 - 281 | N173 | C281 | SIR4_HUMAN - VP64 | 2.24532671 | 1.95E−07 |
| 217 - 281 | N217 | C281 | CHRC1_HUMAN - VP64 | 2.24362966 | 0.03060538 |
| 282 - 293 | N282 | C293 | VP160 - KRAB-MeCP2 | 2.24242293 | 1.26E−06 |
| 173 - 285 | N173 | C285 | SIR4_HUMAN - p65-MyoD | 2.24234219 | 2.79E−05 |
| 313 - 285 | N313 | C285 | SaII - p65-MyoD | 2.24159283 | 4.75E−07 |
| 282 - 58 | N282 | C58 | VP160 - TF3C4_HUMAN | 2.24127139 | 1.64E−05 |
| 105 -281 | N105 | C281 | MBD2_HUMAN - VP64 | 2.23994084 | 1.62E−05 |
| 35 - 285 | N35 | C285 | VPR_JKNp64 - p65-MyoD | 2.23768968 | 7.77E−04 |
| 249 - 281 | N249 | C281 | MTL5_HUMAN - VP64 | 2.23767565 | 1.69E−04 |
| 35 - 290 | N35 | C290 | VPR_JKNp64 - HP1aCS | 2.23706773 | 7.45E−09 |
| 253 - 284 | N253 | C284 | RBBP5_HUMAN - p65-HSF1 | 2.23473704 | 0.00211784 |
| 282 - 55 | N282 | C55 | VP160 - RBBP4_HUMAN | 2.23199999 | 2.57E−04 |
| 281 - 34 | N281 | C34 | VP64 - DNMT3A- | 2.23144475 | 1.48E−09 |
| | | | 3L_JKNp112 | | |
| 281 - 332 | N281 | C332 | VP64 - hs_SIRT5 | 2.2308086 | 1.51E−07 |
| 282 - 42 | N282 | C42 | VP160 - KMT2E_HUMAN | 2.23043258 | 1.95E−07 |
| 280 - 285 | N280 | C285 | CBF1-Cterm - p65-MyoD | 2.23005976 | 4.59E−07 |
| 110- 281 | N110 | C281 | JMJD4_HUMAN - VP64 | 2.22992616 | 4.30E−05 |
| 282 - 237 | N282 | C237 | VP160 - KAT5_HUMAN | 2.22975962 | 1.91E−04 |
| 282 - 199 | N282 | C199 | VP160 - ING3_HUMAN | 2.22891547 | 9.45E−10 |
| 328 -281 | N328 | C281 | hs_PHF19 - VP64 | 2.2281139 | 2.06E−06 |
| 282 - 326 | N282 | C326 | VP160 - pf_Sir2A | 2.22660259 | 2.88E−10 |
| 253 - 14 | N253 | C14 | RBBP5_HUMAN - RELA | 2.2245583 | 0.00227472 |
| 284 - 9 | N284 | C9 | p65-HSF1 - MECP2 | 2.22382064 | 7.03E−06 |
| 282 - 236 | N282 | C236 | VP160 - KAT2A_HUMAN | 2.22201786 | 9.51E−09 |
| 281 - 83 | N281 | C83 | VP64 - SMRD3_HUMAN | 2.22192909 | 6.46E−06 |
| 281 - 87 | N281 | C87 | VP64 - SETD7_HUMAN | 2.22166893 | 1.66E−06 |
| 284 - 290 | N284 | C290 | p65-HSF1 - HP1aCS | 2.22138079 | 2.64E−09 |
| 282 - 179 | N282 | C179 | VP160 - SMRD2_HUMAN | 2.22122487 | 6.21E−07 |
| 284 - 190 | N284 | C190 | p65-HSF1 - ANM1_HUMAN | 2.21895399 | 3.89E−06 |
| 282 - 63 | N282 | C63 | VP160 - SMYD5_HUMAN | 2.2185528 | 7.61E−10 |
| 282 - 34 | N282 | C34 | VP160 - DNMT3A- | 2.21844748 | 1.67E−08 |
| | | | 3L_JKNp112 | | |
| 281 - 164 | N281 | C164 | VP64 - SIR5_HUMAN | 2.21820997 | 2.13E−09 |
| 282 - 193 | N282 | C193 | VP160 - KDM4D_HUMAN | 2.21817555 | 8.00E−07 |
| 281 - 324 | N281 | C324 | VP64 - LBR_HUMAN | 2.21765679 | 9.14E−06 |
| 281 - 133 | N281 | C133 | VP64 - KAT8_HUMAN | 2.2163792 | 7.08E−06 |
| 282 - 172 | N282 | C172 | VP160 - ASH1L_HUMAN | 2.21422087 | 3.60E−09 |
| 35 - 315 | N35 | C315 | VPR_JKNp64 - NCoR | 2.21347846 | 2.18E−07 |
| 343 - 281 | N343 | C281 | NCOR2_HUMAN - VP64 | 2.21324685 | 8.53E−04 |
| 281 - 24 | N281 | C24 | VP64 - CTCFL | 2.21216454 | 5.99E−06 |
| 282 - 216 | N282 | C216 | VP160 - ING5_HUMAN | 2.21198804 | 1.96E−07 |
| 187 - 281 | N187 | C281 | MBD4_HUMAN - VP64 | 2.2107555 | 1.64E−05 |
| 246 - 284 | N246 | C284 | ATRX_HUMAN - p65-HSF1 | 2.21072816 | 6.59E−06 |
| 212 - 14 | N212 | C14 | HDAC8_HUMAN - RELA | 2.20566605 | 1.54E−06 |
| 239 - 284 | N239 | C284 | KDM8_HUMAN - p65-HSF1 | 2.20562298 | 4.89E−06 |
| 281 - 320 | N281 | C320 | VP64 - mMLL3-SET | 2.20529114 | 4.59E−06 |
| 282 - 270 | N282 | C270 | VP160 - ENL | 2.20461588 | 2.54E−08 |
| 284 - 295 | N284 | C295 | p65-HSF1 - SET-TAF1B | 2.20276277 | 1.45E−05 |
| 64 - 281 | N64 | C281 | HDAC2_HUMAN - VP64 | 2.20275196 | 2.32E−04 |
| 282 - 92 | N282 | C92 | VP160 - SMYD1_HUMAN | 2.20210111 | 9.20E−05 |
| 282 - 211 | N282 | C211 | VP160 - KMT2B_HUMAN | 2.20116874 | 3.31E−04 |
| 281 - 305 | N281 | C305 | VP64 - NUE | 2.20083824 | 1.09E−06 |
| 35 - 288 | N35 | C288 | VPR_JKNp64 - SUV[SET] | 2.19996275 | 1.11E−04 |
| 281 - 138 | N281 | C138 | VP64 - TFPT_HUMAN | 2.19995535 | 8.38E−06 |
| 55 - 284 | N55 | C284 | RBBP4_HUMAN - p65-HSF1 | 2.19830129 | 2.99E−06 |
| 281 - 300 | N281 | C300 | VP64 - SIRT6 | 2.19734978 | 1.04E−08 |
| 151 - 284 | N151 | C284 | SIR7_HUMAN - p65-HSF1 | 2.19672988 | 0.00168931 |
| 17 - 285 | N17 | C285 | EZH2 - p65-MyoD | 2.19643707 | 4.59E−09 |
| 284 - 20 | N284 | C20 | p65-HSF1 - KDM1B | 2.19562478 | 8.14E−04 |
| 35 - 8 | N35 | C8 | VPR_JKNp64 - MECP2 | 2.1941769 | 2.31E−06 |
| 281 - 299 | N281 | C299 | VP64 - HST2 | 2.19313122 | 4.92E−09 |
| 112 - 35 | N112 | C35 | KDM5A_HUMAN - | 2.19307818 | 1.05E−05 |
| | | | VPR_JKNp64 | | |
| 282 - 149 | N282 | C149 | VP160 - MBD1_HUMAN | 2.18675073 | 1.71E−06 |
| 231 - 35 | N231 | C35 | KDM5B_HUMAN - | 2.18652808 | 5.11E−04 |
| | | | VPR_JKNp64 | | |
| 282 - 256 | N282 | C256 | VP160 - LSD1-ORF | 2.18641958 | 0.00122296 |
| 281 - 312 | N281 | C312 | VP64 - SetD8 | 2.18333825 | 1.59E−05 |
| 281 - 339 | N281 | C339 | VP64 - SPOC1_HUMAN | 2.18218474 | 4.34E−07 |
| 281 - 210 | N281 | C210 | VP64 - SIR3_HUMAN | 2.18034336 | 2.27E−07 |
| 313 - 10 | N313 | C10 | SaII - HSF1 | 2.17803452 | 1.26E−05 |
| 287 - 285 | N287 | C285 | G9A[SET] - p65-MyoD | 2.17783865 | 8.28E−06 |
| 281 - 119 | N281 | C119 | VP64 - ACL6A_HUMAN | 2.17733184 | 1.45E−06 |
| 282 - 328 | N282 | C328 | VP160 - hs_PHF19 | 2.17605254 | 1.71E−06 |
| 282 - 263 | N282 | C263 | VP160 - HDAC8 | 2.1751416 | 6.43E−05 |
| 275 - 285 | N275 | C285 | DOT1L-DOT1_domain - p65- | 2.17382721 | 4.10E−05 |
| | | | MyoD | | |
| 285 - 205 | N285 | C205 | p65-MyoD - | 2.17250078 | 0.00108665 |
| | | | JMJD7_HUMAN | | |
| 100 - 281 | N100 | C281 | TAF1_HUMAN - VP64 | 2.17210553 | 4.42E−04 |
| 281 - 14 | N281 | C14 | VP64 - RELA | 2.17047246 | 7.82E−06 |
| 87 - 281 | N87 | C281 | SETD7_HUMAN - VP64 | 2.16982206 | 2.49E−05 |
| 281 - 3 | N281 | C3 | VP64 - HDAC3 | 2.16915287 | 8.68E−04 |
| 281 - 348 | N281 | C348 | VP64 - BRDT_HUMAN | 2.16801834 | 3.45E−09 |
| 284 - 275 | N284 | C275 | p65-HSF1 - DOT1L- | 2.16603016 | 2.38E−04 |
| | | | DOT1_domain | | |
| 282 - 16 | N282 | C16 | VP160 - EP300 | 2.16322008 | 2.17E−04 |
| 14 - 15 | N14 | C15 | RELA - EP300 | 2.1627465 | 1.55E−06 |
| 284 - 133 | N284 | C133 | p65-HSF1 - KAT8_HUMAN | 2.16249123 | 2.76E−04 |
| 35 - 187 | N35 | C187 | VPR_JKNp64 - | 2.15803467 | 3.92E−06 |
| | | | MBD4_HUMAN | | |
| 282 - 97 | N282 | C97 | VP160 - CHD3_HUMAN | 2.15715565 | 6.65E−09 |
| 35 - 79 | N35 | C79 | VPR_JKNp64 - | 2.15586603 | 0.00166398 |
| | | | KAT6A_HUMAN | | |
| 282 - 57 | N282 | C57 | VP160 - ANM8_HUMAN | 2.15539535 | 4.48E−05 |
| 282 - 53 | N282 | C53 | VP160 - CBP_HUMAN | 2.15421419 | 4.59E−07 |
| 282 - 118 | N282 | C118 | VP160 - HDAC6_HUMAN | 2.15397819 | 9.87E−06 |
| 75 - 281 | N75 | C281 | KDM5D_HUMAN - VP64 | 2.15323922 | 1.26E−04 |
| 14 - 106 | N14 | C106 | RELA - KAT6B_HUMAN | 2.15100311 | 2.73E−05 |
| 268 - 35 | N268 | C35 | FOXA1-Cterm - | 2.15099614 | 0.00181817 |
| | | | VPR_JKNp64 | | |
| 285 - 116 | N285 | C116 | p65-MyoD - ANM6_HUMAN | 2.15044255 | 3.35E−06 |
| 284 - 191 | N284 | C191 | p65-HSF1 - CDYL_HUMAN | 2.14675114 | 0.00474092 |
| 65 - 281 | N65 | C281 | MCRS1_HUMAN - VP64 | 2.14578408 | 1.31E−05 |
| 285 - 77 | N285 | C77 | p65-MyoD - | 2.14518784 | 8.14E−05 |
| | | | KDM5D_HUMAN | | |
| 281 - 130 | N281 | C130 | VP64 - PRDM2_HUMAN | 2.14468024 | 3.08E−06 |
| 285 - 275 | N285 | C275 | p65-MyoD - DOT1L- | 2.14325576 | 2.89E−07 |
| | | | DOT1_domain | | |
| 280 - 257 | N280 | C257 | CBF1-Cterm - c-Myb-TAD | 2.14318851 | 0.0411472 |
| 281 - 95 | N281 | C95 | VP64 - SETD6_HUMAN | 2.14233763 | 4.61E−07 |
| 282 - 248 | N282 | C248 | VP160 - GLYR1_HUMAN | 2.14213909 | 1.31E−05 |
| 282 - 264 | N282 | C264 | VP160 - MTL5_HUMAN | 2.14094763 | 2.40E−08 |
| 282 - 93 | N282 | C93 | VP160 - ACL6B_HUMAN | 2.13863723 | 3.88E−07 |
| 1 - 284 | N1 | C284 | SETD1A - p65-HSF1 | 2.13846922 | 1.76E−06 |
| 285 - 289 | N285 | C289 | p65-MyoD - FOG1 | 2.13664779 | 2.32E−04 |
| 14 - 280 | N14 | C280 | RELA - CBF1-Cterm | 2.1365757 | 1.52E−07 |
| 281 - 97 | N281 | C97 | VP64 - CHD3_HUMAN | 2.13619432 | 7.76E−07 |
| 282 - 136 | N282 | C136 | VP160 - JMJD6_HUMAN | 2.13455071 | 6.47E−07 |
| 73 - 35 | N73 | C35 | KDM5D_HUMAN - | 2.1342701 | 0.00143559 |
| | | | VPR_JKNp64 | | |
| 285 - 190 | N285 | C190 | p65-MyoD - ANM1_HUMAN | 2.13262482 | 3.30E−05 |
| 282 - 302 | N282 | C302 | VP160 - HDAC11 | 2.131344 | 9.61E−09 |
| 25 - 284 | N25 | C284 | CTCFL - p65-HSF1 | 2.13070346 | 1.24E−06 |
| 281 - 297 | N281 | C297 | VP64 - MesoLo | 2.13065321 | 0.02591663 |
| 282 - 114 | N282 | C114 | VP160 - KDM5A_HUMAN | 2.12948495 | 7.00E−06 |
| 210 - 35 | N210 | C35 | SIR3_HUMAN - | 2.12665349 | 0.0010864 |
| | | | VPR_JKNp64 | | |
| 281 - 36 | N281 | C36 | VP64 - TET1CD_JKNp84 | 2.12657042 | 8.35E−06 |
| 281 - 45 | N281 | C45 | VP64 - KMT2D_HUMAN | 2.12509979 | 8.76E−05 |
| 47 - 281 | N47 | C281 | ANM2_HUMAN - VP64 | 2.12485226 | 5.20E−06 |
| 281 - 212 | N281 | C212 | VP64 - HDAC8_HUMAN | 2.11994934 | 2.85E−06 |
| 281 - 175 | N281 | C175 | VP64 - RUVB2_HUMAN | 2.11975956 | 3.37E−05 |
| 68 - 281 | N68 | C281 | MBD3_HUMAN - VP64 | 2.11935915 | 4.13E−06 |
| 281 - 144 | N281 | C144 | VP64 - UTY_HUMAN | 2.11870323 | 1.12E−05 |
| 190 - 284 | N190 | C284 | ANM1_HUMAN - p65-HSF1 | 2.11837628 | 2.68E−04 |
| 113 - 281 | N113 | C281 | KDM5A_HUMAN - VP64 | 2.11249937 | 1.79E−04 |
| 300 - 285 | N300 | C285 | SIRT6 - p65-MyoD | 2.11231506 | 2.09E−06 |
| 324 - 252 | N324 | C252 | LBR_HUMAN - | 2.1121918 | 0.00194586 |
| | | | HCFC1_HUMAN | | |
| 281 - 272 | N281 | C272 | VP64 - Sir2 | 2.11112776 | 6.28E−06 |
| 35 - 302 | N35 | C302 | VPR_JKNp64 - HDAC11 | 2.11061411 | 9.69E−04 |
| 284 - 131 | N284 | C131 | p65-HSF1 - | 2.11031994 | 8.72E−04 |
| | | | PRDM2_HUMAN | | |
| 282 - 189 | N282 | C189 | VP160 - ING2_HUMAN | 2.10888498 | 7.95E−05 |
| 35 - 272 | N35 | C272 | VPR_JKNp64 - Sir2 | 2.10760801 | 3.14E−04 |
| 88 - 35 | N88 | C35 | ING4_HUMAN - | 2.10668106 | 1.04E−05 |
| | | | VPR_JKNp64 | | |
| 255 - 35 | N255 | C35 | EED_HUMAN - | 2.1058882 | 0.0066058 |
| | | | VPR_JKNp64 | | |
| 282 - 107 | N282 | C107 | VP160 - KAT6B_HUMAN | 2.10291055 | 8.82E−08 |
| 285 - 250 | N285 | C250 | p65-MyoD - | 2.10186153 | 0.00608744 |
| | | | HCFC1_HUMAN | | |
| 35 - 185 | N35 | C185 | VPR_JKNp64 - | 2.09944774 | 0.00354754 |
| | | | RBBP7_HUMAN | | |
| 55 - 281 | N55 | C281 | RBBP4_HUMAN - VP64 | 2.09935178 | 4.81E−09 |
| 281 - 61 | N281 | C61 | VP64 - HAT1_HUMAN | 2.09777117 | 2.95E−09 |
| 284 - 306 | N284 | C306 | p65-HSF1 - CobB | 2.09575486 | 1.76E−05 |
| 285 - 55 | N285 | C55 | p65-MyoD - | 2.09522499 | 3.92E−05 |
| | | | RBBP4_HUMAN | | |
| 281 - 136 | N281 | C136 | VP64 - JMJD6_HUMAN | 2.09492147 | 4.80E−05 |
| 281 - 12 | N281 | C12 | VP64 - KMT2A | 2.09213372 | 2.24E−05 |
| 230 - 14 | N230 | C14 | NFRKB_HUMAN - RELA | 2.09156776 | 0.00171348 |
| 17 - 257 | N17 | C257 | EZH2 - c-Myb-TAD | 2.09096344 | 0.02495112 |
| 35 - 300 | N35 | C300 | VPR_JKNp64 - SIRT6 | 2.0908266 | 6.20E−05 |
| 282 - 167 | N282 | C167 | VP160 - EHMT1_HUMAN | 2.09050953 | 8.05E−06 |
| 281 - 219 | N281 | C219 | VP64 - JARD2_HUMAN | 2.09034567 | 7.80E−08 |
| 282 - 66 | N282 | C66 | VP160 - DOT1L_HUMAN | 2.09015107 | 7.71E−06 |
| 282 - 47 | N282 | C47 | VP160 - ANM2_HUMAN | 2.08995378 | 2.10E−07 |
| 282 - 222 | N282 | C222 | VP160 - IN80E_HUMAN | 2.08925667 | 1.50E−07 |
| 285 - 73 | N285 | C73 | p65-MyoD - | 2.08832051 | 1.38E−06 |
| | | | KDM5D_HUMAN | | |
| 79 - 281 | N79 | C281 | KAT6A_HUMAN - VP64 | 2.08796482 | 5.34E−05 |
| 219 - 284 | N219 | C284 | JARD2_HUMAN - p65-HSF1 | 2.08774676 | 0.00404254 |
| 281 - 183 | N281 | C183 | VP64 - KMT2C_HUMAN | 2.08423546 | 1.20E−04 |
| 284 - 2 | N284 | C2 | p65-HSF1 - SETD1A | 2.08294722 | 0.00297395 |
| 282 - 305 | N282 | C305 | VP160 - NUE | 2.08253006 | 5.87E−08 |
| 346 - 284 | N346 | C284 | MSX2_HUMAN - p65-HSF1 | 2.08221538 | 1.44E−06 |
| 282 - 311 | N282 | C311 | VP160 - Sin3a | 2.08211571 | 1.55E−09 |
| 250 - 296 | N250 | C296 | HCFC1_HUMAN - HP1a | 2.07899171 | 7.44E−05 |
| 74 - 285 | N74 | C285 | KDM5D_HUMAN - p65- | 2.07811607 | 0.00295941 |
| | | | MyoD | | |
| 285 - 130 | N285 | C130 | p65-MyoD - | 2.07806051 | 5.08E−06 |
| | | | PRDM2_HUMAN | | |
| 285 - 346 | N285 | C346 | p65-MyoD - MSX2_HUMAN | 2.0773162 | 6.57E−07 |
| 158 - 281 | N158 | C281 | SETB1_HUMAN - VP64 | 2.07689842 | 5.49E−05 |
| 281 - 18 | N281 | C18 | VP64 - EZH2 | 2.07369886 | 1.00E−06 |
| 173 - 284 | N173 | C284 | SIR4_HUMAN - p65-HSF1 | 2.07304839 | 2.24E−06 |
| 281 - 193 | N281 | C193 | VP64 - KDM4D_HUMAN | 2.07124304 | 2.62E−08 |
| 281 - 344 | N281 | C344 | VP64 - HDAC3_HUMAN | 2.07053932 | 3.37E−07 |
| 38 - 281 | N38 | C281 | EHMT2 - VP64 | 2.06912926 | 1.68E−07 |
| 284 - 205 | N284 | C205 | p65-HSF1 - JMJD7_HUMAN | 2.06883935 | 4.77E−05 |
| 245 - 252 | N245 | C252 | TYY1_HUMAN - | 2.06882456 | 0.00110138 |
| | | | HCFC1_HUMAN | | |
| 282 - 129 | N282 | C129 | VP160 - HAIR_HUMAN | 2.06872858 | 1.14E−05 |
| 35 - 293 | N35 | C293 | VPR_JKNp64 - KRAB- | 2.06754934 | 6.43E−05 |
| | | | MeCP2 | | |
| 281 - 159 | N281 | C159 | VP64 - SETB1_HUMAN | 2.06658828 | 1.61E−04 |
| 281 - 143 | N281 | C143 | VP64 - KDM4B_HUMAN | 2.06629216 | 7.66E−05 |
| 282 - 135 | N282 | C135 | VP160 - KDM2A_HUMAN | 2.0616614 | 3.00E−06 |
| 285 - 69 | N285 | C69 | p65-MyoD - | 2.06107531 | 4.75E−08 |
| | | | SETB2_HUMAN | | |
| 284 - 88 | N284 | C88 | p65-HSF1 - ING4_HUMAN | 2.05969798 | 2.82E−04 |
| 284 - 138 | N284 | C138 | p65-HSF1 - TFPT_HUMAN | 2.05968029 | 3.85E−06 |
| 282 - 133 | N282 | C133 | VP160 - KAT8_HUMAN | 2.05884521 | 2.23E−07 |
| 281 - 120 | N281 | C120 | VP64 - RING1_HUMAN | 2.05735372 | 3.03E−07 |
| 35 - 219 | N35 | C219 | VPR_JKNp64 - | 2.05724647 | 6.21E−05 |
| | | | JARD2_HUMAN | | |
| 239 - 281 | N239 | C281 | KDM8_HUMAN - VP64 | 2.05682256 | 6.23E−05 |
| 35 - 257 | N35 | C257 | VPR_JKNp64 - c-Myb-TAD | 2.05613909 | 3.69E−08 |
| 345 - 35 | N345 | C35 | MSX2_HUMAN - | 2.05493578 | 5.16E−05 |
| | | | VPR_JKNp64 | | |
| 284 - 308 | N284 | C308 | p65-HSF1 - HDT1 | 2.0516017 | 3.40E−06 |
| 282 - 85 | N282 | C85 | VP160 - SMYD3_HUMAN | 2.05024147 | 9.63E−08 |
| 282 - 146 | N282 | C146 | VP160 - KDM4A_HUMAN | 2.04938541 | 3.37E−04 |
| 284 - 15 | N284 | C15 | p65-HSF1 - EP300 | 2.04720103 | 1.67E−05 |
| 282 - 59 | N282 | C59 | VP160 - INO80_HUMAN | 2.0470798 | 4.79E−08 |
| 163 - 285 | N163 | C285 | ANM7_HUMAN - p65-MyoD | 2.04454795 | 0.00618745 |
| 257 - 35 | N257 | C35 | c-Myb-TAD - VPR_JKNp64 | 2.04447107 | 3.54E−07 |
| 285 - 78 | N285 | C78 | p65-MyoD - | 2.04282356 | 1.59E−05 |
| | | | KAT6A_HUMAN | | |
| 282 - 221 | N282 | C221 | VP160 - SMYD2_HUMAN | 2.04274035 | 9.40E−04 |
| 35 - 68 | N35 | C68 | VPR_JKNp64 - | 2.04263402 | 1.17E−06 |
| | | | MBD3_HUMAN | | |
| 222 - 285 | N222 | C285 | IN80E_HUMAN - p65-MyoD | 2.04185789 | 9.83E−08 |
| 282 - 276 | N282 | C276 | VP160 - EHMT2(G9a)-Cterm | 2.04064435 | 1.01E−04 |
| 281 - 186 | N281 | C186 | VP64 - RIOX2_HUMAN | 2.04015062 | 9.37E−08 |
| 136 - 285 | N136 | C285 | JMJD6_HUMAN - p65- | 2.04011751 | 3.54E−05 |
| | | | MyoD | | |
| 281 - 42 | N281 | C42 | VP64 - KMT2E_HUMAN | 2.03906919 | 1.84E−07 |
| 281 - 349 | N281 | C349 | VP64 - DAM_N132A | 2.03613229 | 3.21E−06 |
| 281 - 343 | N281 | C343 | VP64 - NCOR2_HUMAN | 2.03611409 | 0.00162656 |
| 281 - 310 | N281 | C310 | VP64 - TgSET8 | 2.0361093 | 1.06E−06 |
| 282 - 320 | N282 | C320 | VP160 - mMLL3-SET | 2.03583016 | 8.46E−06 |
| 35 - 296 | N35 | C296 | VPR_JKNp64 - HP1a | 2.03534409 | 2.82E−07 |
| 35 - 327 | N35 | C327 | VPR_JKNp64 - hs_NIPP1 | 2.03507915 | 6.77E−04 |
| 35 - 222 | N35 | C222 | VPR_JKNp64 - | 2.03467912 | 1.50E−05 |
| | | | IN80E_HUMAN | | |
| 51 - 281 | N51 | C281 | UCHL5_HUMAN - VP64 | 2.03449864 | 6.21E−05 |
| 2 - 285 | N2 | C285 | SETD1A - p65-MyoD | 2.03226426 | 7.89E−04 |
| 284 - 266 | N284 | C266 | p65-HSF1 - GADD45A | 2.0319566 | 5.01E−06 |
| 17 - 14 | N17 | C14 | EZH2 - RELA | 2.03155184 | 4.10E−08 |
| 285 - 129 | N285 | C129 | p65-MyoD - HAIR_HUMAN | 2.03104294 | 0.00869132 |
| 284 - 77 | N284 | C77 | p65-HSF1 - | 2.0305289 | 1.25E−04 |
| | | | KDM5D_HUMAN | | |
| 284 - 300 | N284 | C300 | p65-HSF1 - SIRT6 | 2.0302157 | 9.26E−05 |
| 35 - 308 | N35 | C308 | VPR_JKNp64 - HDT1 | 2.0285866 | 1.07E−04 |
| 165 - 281 | N165 | C281 | MTA2_HUMAN - VP64 | 2.02818101 | 0.00157059 |
| 281 - 151 | N281 | C151 | VP64 - SIR7_HUMAN | 2.0253243 | 0.00383897 |
| 281 - 173 | N281 | C173 | VP64 - SIR4_HUMAN | 2.02516507 | 2.10E−07 |
| 73 - 114 | N73 | C114 | KDM5D_HUMAN - | 2.0250142 | 0.00565123 |
| | | | KDM5A_HUMAN | | |
| 35 - 17 | N35 | C17 | VPR_JKNp64 - EZH2 | 2.02469703 | 0.00102692 |
| 282 - 287 | N282 | C287 | VP160 - G9A[SET] | 2.02419219 | 2.39E−07 |
| 282 - 327 | N282 | C327 | VP160 - hs_NIPP1 | 2.02390198 | 1.75E−08 |
| 282 - 336 | N282 | C336 | VP160 - ce_Set4 | 2.02382475 | 9.07E−07 |
| 284 - 176 | N284 | C176 | p65-HSF1 - ARP8_HUMAN | 2.02245899 | 5.40E−04 |
| 123 - 281 | N123 | C281 | KMT2A_HUMAN - VP64 | 2.02053994 | 7.04E−04 |
| 273 - 284 | N273 | C284 | PRDM9-CD - p65-HSF1 | 2.01903656 | 2.55E−04 |
| 284 - 264 | N284 | C264 | p65-HSF1 - MTL5_HUMAN | 2.01766977 | 1.20E−04 |
| 285 - 194 | N285 | C194 | p65-MyoD - ING1_HUMAN | 2.01465144 | 2.27E−05 |
| 282 - 332 | N282 | C332 | VP160 - hs_SIRT5 | 2.01333305 | 1.65E−08 |
| 285 - 265 | N285 | C265 | p65-MyoD - EZH2 | 2.01321769 | 0.01225195 |
| 33 - 290 | N33 | C290 | Hilton_2015 - HP1aCS | 2.01275581 | 3.33E−05 |
| 301 -281 | N301 | C281 | SIRT3 - VP64 | 2.01247983 | 4.38E−05 |
| 73 - 284 | N73 | C284 | KDM5D_HUMAN - p65- | 2.01019613 | 3.40E−07 |
| | | | HSF1 | | |
| 282 - 110 | N282 | C110 | VP160 - JMJD4_HUMAN | 2.0097467 | 6.28E−07 |
| 348 - 281 | N348 | C281 | BRDT_HUMAN - VP64 | 2.00642342 | 1.27E−04 |
| 284 - 312 | N284 | C312 | p65-HSF1 - SetD8 | 2.00542888 | 7.03E−06 |
| 153 - 5 | N153 | C5 | KAT7_HUMAN - KDM1A | 2.00426386 | 0.00803587 |
| 281 - 235 | N281 | C235 | VP64 - CARM1_HUMAN | 2.00354284 | 1.71E−05 |
| 35 - 5 | N35 | C5 | VPR_JKNp64 - KDM1A | 2.00296159 | 1.54E−05 |
| 334 - 166 | N334 | C166 | hs_RCOR1 - | 2.00286881 | 0.01289817 |
| | | | EHMT1_HUMAN | | |
| 35 - 345 | N35 | C345 | VPR_JKNp64 - | 2.00225994 | 3.81E−04 |
| | | | MSX2_HUMAN | | |
| 282 -201 | N282 | C201 | VP160 - KDM2B_HUMAN | 2.00155393 | 1.36E−04 |
| 35 - 317 | N35 | C317 | VPR_JKNp64 - HDAC3 | 2.00132914 | 0.01092336 |
| 284 - 142 | N284 | C142 | p65-HSF1 - | 2.00126164 | 0.00338073 |
| | | | SMRC1_HUMAN | | |
| 285 - 183 | N285 | C183 | p65-MyoD - | 2.00034505 | 0.00613708 |
| | | | KMT2C_HUMAN | | |
| 282 - 229 | N282 | C229 | VP160 - NFRKB_HUMAN | 1.99995616 | 1.89E−07 |
| 281 - 37 | N281 | C37 | VP64 - KDM6A | 1.99873976 | 4.59E−07 |
| 32 - 284 | N32 | C284 | Gilbert_Lab_CRISPRi_KRAB - | 1.99861414 | 6.57E−06 |
| | | | p65-HSF1 | | |
| 185 - 281 | N185 | C281 | RBBP7_HUMAN - VP64 | 1.99792689 | 3.05E−05 |
| 285 - 255 | N285 | C255 | p65-MyoD - EED_HUMAN | 1.99771158 | 0.00183136 |
| 14 - 267 | N14 | C267 | RELA - FOXA1-Nterm | 1.99704806 | 1.91E−07 |
| 274 - 284 | N274 | C284 | UBE2A - p65-HSF1 | 1.99538731 | 1.03E−05 |
| 285 - 266 | N285 | C266 | p65-MyoD - GADD45A | 1.99492751 | 2.23E−05 |
| 285 - 113 | N285 | C113 | p65-MyoD - | 1.99433294 | 8.65E−04 |
| | | | KDM5A_HUMAN | | |
| 281 - 336 | N281 | C336 | VP64 - ce_Set4 | 1.99427602 | 1.54E−05 |
| 285 - 314 | N285 | C314 | p65-MyoD - MeCP2 | 1.99261597 | 6.14E−06 |
| 323 - 281 | N323 | C281 | HNRPU_HUMAN - VP64 | 1.98630441 | 0.00310134 |
| 285 - 5 | N285 | C5 | p65-MyoD - KDM1A | 1.98614608 | 6.36E−05 |
| 281 - 295 | N281 | C295 | VP64 - SET-TAF1B | 1.98246657 | 1.70E−06 |
| 282 - 89 | N282 | C89 | VP160 - CHD4_HUMAN | 1.98181578 | 1.04E−04 |
| 285 - 312 | N285 | C312 | p65-MyoD - SetD8 | 1.98175316 | 7.57E−07 |
| 281 - 135 | N281 | C135 | VP64 - KDM2A_HUMAN | 1.98143357 | 2.67E−07 |
| 95 - 281 | N95 | C281 | SETD6_HUMAN - VP64 | 1.98013802 | 6.61E−05 |
| 56 - 281 | N56 | C281 | SUV92_HUMAN - VP64 | 1.97717575 | 2.43E−06 |
| 47 - 252 | N47 | C252 | ANM2_HUMAN - | 1.9770421 | 0.00183393 |
| | | | HCFC1_HUMAN | | |
| 284 - 186 | N284 | C186 | p65-HSF1 - RIOX2_HUMAN | 1.97668459 | 1.83E−04 |
| 233 - 285 | N233 | C285 | HINFP_HUMAN - p65- | 1.97470241 | 1.08E−04 |
| | | | MyoD | | |
| 285 - 179 | N285 | C179 | p65-MyoD - | 1.97456765 | 0.00119515 |
| | | | SMRD2_HUMAN | | |
| 285 - 246 | N285 | C246 | p65-MyoD - ATRX_HUMAN | 1.97404055 | 7.60E−08 |
| 281 - 204 | N281 | C204 | VP64 - HIF1N_HUMAN | 1.9730373 | 5.05E−06 |
| 282 -210 | N282 | C210 | VP160 - SIR3_HUMAN | 1.97299802 | 2.50E−07 |
| 281 - 16 | N281 | C16 | VP64 - EP300 | 1.97283717 | 1.77E−05 |
| 282 - 81 | N282 | C81 | VP160 - NCOA3_HUMAN | 1.97137444 | 0.00448076 |
| 281 - 249 | N281 | C249 | VP64 - HAC1-HAT | 1.97080605 | 2.54E−07 |
| 317 - 35 | N317 | C35 | HDAC3 - VPR_JKNp64 | 1.96994898 | 8.12E−05 |
| 285 - 135 | N285 | C135 | p65-MyoD - | 1.96978944 | 1.17E−04 |
| | | | KDM2A_HUMAN | | |
| 295 - 281 | N295 | C281 | SET-TAF1B - VP64 | 1.96842528 | 7.15E−05 |
| 14 - 204 | N14 | C204 | RELA - HIFIN_HUMAN | 1.96796472 | 1.74E−04 |
| 35 - 229 | N35 | C229 | VPR_JKNp64 - | 1.96589143 | 0.00605368 |
| | | | NFRKB_HUMAN | | |
| 284 - 73 | N284 | C73 | p65-HSF1 - | 1.9654438 | 1.92E−07 |
| | | | KDM5D_HUMAN | | |
| 33 - 314 | N33 | C314 | Hilton_2015 - MeCP2 | 1.96113448 | 0.00134362 |
| 284 - 27 | N284 | C27 | p65-HSF1 - EZH1 | 1.96096144 | 8.82E−06 |
| 35 - 346 | N35 | C346 | VPR_JKNp64 - | 1.96041127 | 6.00E−08 |
| | | | MSX2_HUMAN | | |
| 281 - 22 | N281 | C22 | VP64 - TET1 | 1.9599033 | 4.14E−05 |
| 35 - 38 | N35 | C38 | VPR_JKNp64 - EHMT2 | 1.95802492 | 9.33E−04 |
| 281 - 28 | N281 | C28 | VP64 - EHMT2 | 1.9576252 | 0.00733542 |
| 186 - 285 | N186 | C285 | RIOX2_HUMAN - p65- | 1.95703539 | 2.37E−04 |
| | | | MyoD | | |
| 35 - 77 | N35 | C77 | VPR_JKNp64 - | 1.95685339 | 1.05E−05 |
| | | | KDM5D_HUMAN | | |
| 21 - 281 | N21 | C281 | KDM1B - VP64 | 1.95457502 | 2.78E−04 |
| 66 - 281 | N66 | C281 | DOT1L_HUMAN - VP64 | 1.95360935 | 5.33E−06 |
| 201 - 281 | N201 | C281 | KDM2B_HUMAN - VP64 | 1.9534716 | 2.15E−05 |
| 45 - 35 | N45 | C35 | KMT2D_HUMAN - | 1.95017955 | 0.00474272 |
| | | | VPR_JKNp64 | | |
| 111 - 284 | N111 | C284 | KDM5A_HUMAN - p65- | 1.94990107 | 0.00102169 |
| | | | HSF1 | | |
| 200 - 24 | N200 | C24 | ARP5_HUMAN - CTCFL | 1.94966366 | 0.00277562 |
| 282 - 22 | N282 | C22 | VP160 - TET1 | 1.94683413 | 2.01E−06 |
| 285 - 9 | N285 | C9 | p65-MyoD - MECP2 | 1.94502328 | 5.29E−06 |
| 282 - 147 | N282 | C147 | VP160 - NSD3_HUMAN | 1.94421334 | 2.57E−05 |
| 281 - 123 | N281 | C123 | VP64 - KMT2A_HUMAN | 1.94340495 | 1.45E−04 |
| 284 - 150 | N284 | C150 | p65-HSF1 - | 1.94246633 | 1.16E−05 |
| | | | HDA11_HUMAN | | |
| 284 - 43 | N284 | C43 | p65-HSF1 - SETD4_HUMAN | 1.94176262 | 0.00182952 |
| 268 - 257 | N268 | C257 | FOXA1-Cterm - c-Myb-TAD | 1.94052674 | 2.35E−04 |
| 281 - 59 | N281 | C59 | VP64 - INO80_HUMAN | 1.94041681 | 1.96E−05 |
| 281 - 187 | N281 | C187 | VP64 - MBD4_HUMAN | 1.94007755 | 1.46E−07 |
| 296 - 284 | N296 | C284 | HP1a - p65-HSF1 | 1.93993584 | 3.30E−07 |
| 282 - 253 | N282 | C253 | VP160 - RBBP5_HUMAN | 1.93943511 | 5.23E−06 |
| 281 - 101 | N281 | C101 | VP64 - TAF1_HUMAN | 1.93812061 | 1.05E−06 |
| 114 - 14 | N114 | C14 | KDM5A_HUMAN - RELA | 1.93786076 | 1.07E−05 |
| 324 - 285 | N324 | C285 | LBR_HUMAN - p65-MyoD | 1.93753803 | 1.81E−05 |
| 35 - 266 | N35 | C266 | VPR_JKNp64 - GADD45A | 1.93645883 | 9.10E−04 |
| 284 - 305 | N284 | C305 | p65-HSF1 - NUE | 1.93457418 | 9.12E−07 |
| 282 - 271 | N282 | C271 | VP160 - GCN5 | 1.9344222 | 5.17E−06 |
| 49 - 284 | N49 | C284 | NCOA1_HUMAN - p65- | 1.93269272 | 0.00492592 |
| | | | HSF1 | | |
| 282 - 130 | N282 | C130 | VP160 - PRDM2_HUMAN | 1.93207524 | 1.10E−07 |
| 205 - 99 | N205 | C99 | JMJD7_HUMAN - | 1.93092621 | 0.00123955 |
| | | | IN80C_HUMAN | | |
| 284 - 216 | N284 | C216 | p65-HSF1 - ING5_HUMAN | 1.93086493 | 1.37E−06 |
| 285 - 127 | N285 | C127 | p65-MyoD - | 1.93063443 | 1.74E−06 |
| | | | SETMR_HUMAN | | |
| 26 - 281 | N26 | C281 | EZH1 - VP64 | 1.93024493 | 0.00582035 |
| 282 - 70 | N282 | C70 | VP160 - SETB2_HUMAN | 1.92912207 | 1.49E−06 |
| 35 - 132 | N35 | C132 | VPR_JKNp64 - | 1.92886237 | 0.00119139 |
| | | | PRDM2_HUMAN | | |
| 35 - 214 | N35 | C214 | VPR_JKNp64 - | 1.92868542 | 5.28E−04 |
| | | | HDAC4_HUMAN | | |
| 254 - 281 | N254 | C281 | MEN1_HUMAN - VP64 | 1.92754138 | 0.00368272 |
| 291 - 222 | N291 | C222 | SS18 - IN80E_HUMAN | 1.92736055 | 0.01785917 |
| 282 - 330 | N282 | C330 | VP160 - ce_Set1 | 1.92614015 | 2.20E−06 |
| 282 - 190 | N282 | C190 | VP160 - ANM1_HUMAN | 1.92478498 | 2.99E−07 |
| 285 - 268 | N285 | C268 | p65-MyoD - FOXA1-Cterm | 1.9222326 | 0.00213465 |
| 282 - 348 | N282 | C348 | VP160 - BRDT_HUMAN | 1.92197067 | 4.06E−08 |
| 267 - 284 | N267 | C284 | FOXA1-Nterm - p65-HSF1 | 1.9210844 | 1.32E−04 |
| 282 - 303 | N282 | C303 | VP160 - EZH2 | 1.91796494 | 8.41E−06 |
| 281 - 308 | N281 | C308 | VP64 - HDT1 | 1.91657265 | 6.82E−04 |
| 284 - 311 | N284 | C311 | p65-HSF1 - Sin3a | 1.91270844 | 5.73E−07 |
| 280 - 252 | N280 | C252 | CBF1-Cterm - | 1.91203499 | 4.91E−06 |
| | | | HCFC1_HUMAN | | |
| 65 - 285 | N65 | C285 | MCRS1_HUMAN - p65- | 1.91173345 | 0.01288536 |
| | | | MyoD | | |
| 282 - 112 | N282 | C112 | VP160 - KDMSA_HUMAN | 1.90975054 | 5.73E−07 |
| 282 - 324 | N282 | C324 | VP160 - LBR_HUMAN | 1.90933138 | 3.31E−06 |
| 292 - 91 | N292 | C91 | MQ1(Q147L) - | 1.90724795 | 0.01228607 |
| | | | ANM5_HUMAN | | |
| 282 - 143 | N282 | C143 | VP160 - KDM4B_HUMAN | 1.90679029 | 0.00198636 |
| 281 - 271 | N281 | C271 | VP64 - GCN5 | 1.90540686 | 6.48E−04 |
| 267 - 14 | N267 | C14 | FOXA1-Nterm - RELA | 1.90436128 | 0.012242 |
| 282 - 61 | N282 | C61 | VP160 - HAT1_HUMAN | 1.9041584 | 4.30E−07 |
| 182 - 281 | N182 | C281 | MTA3_HUMAN - VP64 | 1.90392918 | 8.67E−05 |
| 281 - 150 | N281 | C150 | VP64 - HDA11_HUMAN | 1.90332449 | 1.62E−07 |
| 272 - 281 | N272 | C281 | Sir2 - VP64 | 1.90290829 | 5.82E−04 |
| 219 - 281 | N219 | C281 | JARD2_HUMAN - VP64 | 1.90069476 | 0.00374917 |
| 14 - 296 | N14 | C296 | RELA - HP1a | 1.89892589 | 2.48E−04 |
| 35 - 205 | N35 | C205 | VPR_JKNp64 - | 1.89807771 | 0.00185102 |
| | | | JMJD7_HUMAN | | |
| 282 - 296 | N282 | C296 | VP160 - HP1a | 1.89704516 | 3.86E−05 |
| 143 - 281 | N143 | C281 | KDM4B_HUMAN - VP64 | 1.89704201 | 8.86E−04 |
| 282 - 132 | N282 | C132 | VP160 - PRDM2_HUMAN | 1.89457176 | 4.71E−07 |
| 282 - 307 | N282 | C307 | VP160 - KYP | 1.89413541 | 8.55E−08 |
| 230 - 332 | N230 | C332 | NFRKB_HUMAN - | 1.89300478 | 0.02578195 |
| | | | hs_SIRT5 | | |
| 25 - 252 | N25 | C252 | CTCFL - HCFC1_HUMAN | 1.89293832 | 2.15E−04 |
| 284 - 187 | N284 | C187 | p65-HSF1 - MBD4_HUMAN | 1.89176455 | 4.09E−05 |
| 199 - 284 | N199 | C284 | ING3_HUMAN - p65-HSF1 | 1.89081256 | 3.49E−04 |
| 307 - 281 | N307 | C281 | KYP - VP64 | 1.88786733 | 4.42E−05 |
| 35 - 217 | N35 | C217 | VPR_JKNp64 - | 1.88612749 | 2.27E−04 |
| | | | CHRC1_HUMAN | | |
| 240 - 281 | N240 | C281 | ANM3_HUMAN - VP64 | 1.88605515 | 0.00392448 |
| 35 - 216 | N35 | C216 | VPR_JKNp64 - | 1.88337149 | 8.10E−05 |
| | | | ING5_HUMAN | | |
| 281 - 317 | N281 | C317 | VP64 - HDAC3 | 1.88287303 | 2.08E−07 |
| 35 - 268 | N35 | C268 | VPR_JKNp64 - FOXA1- | 1.88043656 | 1.31E−04 |
| | | | Cterm | | |
| 285 - 326 | N285 | C326 | p65-MyoD - pf_Sir2A | 1.87990074 | 8.45E−06 |
| 295 - 285 | N295 | C285 | SET-TAF1B - p65-MyoD | 1.87814815 | 3.24E−06 |
| 35 - 108 | N35 | C108 | VPR_JKNp64 - | 1.87661628 | 0.00808688 |
| | | | KAT6B_HUMAN | | |
| 271 - 281 | N271 | C281 | GCN5 - VP64 | 1.8717501 | 0.00393244 |
| 57 - 284 | N57 | C284 | ANM8_HUMAN - p65-HSF1 | 1.87154695 | 1.40E−04 |
| 282 - 177 | N282 | C177 | VP160 - KDM5C_HUMAN | 1.87112709 | 1.04E−06 |
| 88 - 284 | N88 | C284 | ING4_HUMAN - p65-HSF1 | 1.87092393 | 3.78E−05 |
| 281 - 287 | N281 | C287 | VP64 - G9A[SET] | 1.87070852 | 1.67E−04 |
| 281 - 79 | N281 | C79 | VP64 - KAT6A_HUMAN | 1.87048484 | 4.92E−08 |
| 282 - 64 | N282 | C64 | VP160 - HDAC2_HUMAN | 1.86897441 | 0.00104748 |
| 18 - 252 | N18 | C252 | EZH2 - HCFC1_HUMAN | 1.86814975 | 0.00520327 |
| 252 - 186 | N252 | C186 | HCFC1_HUMAN - | 1.86708258 | 0.0182183 |
| | | | RIOX2_HUMAN | | |
| 35 - 56 | N35 | C56 | VPR_JKNp64 - | 1.8658229 | 0.00345381 |
| | | | SUV92_HUMAN | | |
| 282 - 76 | N282 | C76 | VP160 - KDM5D_HUMAN | 1.86568445 | 1.24E−04 |
| 14 - 214 | N14 | C214 | RELA - HDAC4_HUMAN | 1.86448598 | 2.46E−04 |
| 285 - 164 | N285 | C164 | p65-MyoD - SIR5_HUMAN | 1.86366354 | 0.00143534 |
| 285 - 88 | N285 | C88 | p65-MyoD - ING4_HUMAN | 1.86351717 | 1.62E−06 |
| 284 - 183 | N284 | C183 | p65-HSF1 - | 1.86097959 | 1.89E−04 |
| | | | KMT2C_HUMAN | | |
| 136 - 284 | N136 | C284 | JMJD6_HUMAN - p65-HSF1 | 1.85975617 | 4.14E−06 |
| 281 - 213 | N281 | C213 | VP64 - HBAP1_HUMAN | 1.85934508 | 2.35E−05 |
| 282 - 333 | N282 | C333 | VP160 - sc_RPD3 | 1.85934238 | 7.37E−05 |
| 146 - 281 | N146 | C281 | KDM4A_HUMAN - VP64 | 1.8581589 | 0.00618304 |
| 282 - 220 | N282 | C220 | VP160 - JARD2_HUMAN | 1.85745779 | 5.22E−06 |
| 87 - 285 | N87 | C285 | SETD7_HUMAN - p65- | 1.85643246 | 0.00281988 |
| | | | MyoD | | |
| 14 - 250 | N14 | C250 | RELA - HCFC1_HUMAN | 1.85562951 | 0.00282554 |
| 3 - 281 | N3 | C281 | HDAC3 - VP64 | 1.85548396 | 6.97E−05 |
| 282 - 331 | N282 | C331 | VP160 - mm_G9a | 1.85459834 | 6.87E−05 |
| 14 - 213 | N14 | C213 | RELA - HBAP1_HUMAN | 1.85272973 | 0.01756629 |
| 284 - 127 | N284 | C127 | p65-HSF1 - | 1.8520529 | 0.00159107 |
| | | | SETMR_HUMAN | | |
| 200 - 280 | N200 | C280 | ARP5_HUMAN - CBF1- | 1.85112699 | 0.00717696 |
| | | | Cterm | | |
| 227 - 281 | N227 | C281 | SIR1_HUMAN - VP64 | 1.85070357 | 0.00541639 |
| 281 - 127 | N281 | C127 | VP64 - SETMR_HUMAN | 1.84993394 | 1.65E−04 |
| 280 - 14 | N280 | C14 | CBF1-Cterm - RELA | 1.84964329 | 4.91E−07 |
| 281 - 147 | N281 | C147 | VP64 - NSD3_HUMAN | 1.84960728 | 0.00223977 |
| 14 - 130 | N14 | C130 | RELA - PRDM2_HUMAN | 1.84866998 | 1.91E−04 |
| 284 - 198 | N284 | C198 | p65-HSF1 - JMJD8_HUMAN | 1.84832111 | 2.40E−05 |
| 200 - 14 | N200 | C14 | ARP5_HUMAN - RELA | 1.84627457 | 0.00292666 |
| 282 - 329 | N282 | C329 | VP160 - pbcv1_vSET | 1.84570229 | 4.99E−05 |
| 252 - 46 | N252 | C46 | HCFC1_HUMAN - | 1.84557524 | 0.01401591 |
| | | | SMRD1_HUMAN | | |
| 282 - 317 | N282 | C317 | VP160 - HDAC3 | 1.8450851 | 1.33E−06 |
| 282 - 6 | N282 | C6 | VP160 - KDM1A | 1.84435642 | 2.48E−04 |
| 78 - 14 | N78 | C14 | KAT6A_HUMAN - RELA | 1.84412756 | 0.00826099 |
| 339 - 14 | N339 | C14 | SPOC1_HUMAN - RELA | 1.84216336 | 8.51E−04 |
| 277 - 284 | N277 | C284 | SUV39H1 - p65-HSF1 | 1.84198917 | 0.00791002 |
| 138 - 312 | N138 | C312 | TFPT_HUMAN - SetD8 | 1.84197551 | 0.00944124 |
| 5 - 10 | N5 | C10 | KDM1A - HSF1 | 1.8402101 | 3.51E−04 |
| 282 - 262 | N282 | C262 | VP160 - EZH2 | 1.84019137 | 4.63E−04 |
| 281 - 50 | N281 | C50 | VP64 - NCOA1_HUMAN | 1.83985376 | 5.34E−05 |
| 282 - 202 | N282 | C202 | VP160 - KDM2B_HUMAN | 1.8371192 | 2.33E−04 |
| 282 - 265 | N282 | C265 | VP160 - EZH2 | 1.83706036 | 0.01476984 |
| 14 - 348 | N14 | C348 | RELA - BRDT_HUMAN | 1.83634283 | 0.00206567 |
| 282 - 43 | N282 | C43 | VP160 - SETD4_HUMAN | 1.83588922 | 5.36E−06 |
| 160 - 281 | N160 | C281 | KMT5A_HUMAN - VP64 | 1.83549204 | 1.15E−04 |
| 282 - 7 | N282 | C7 | VP160 - ZNF10 | 1.83442866 | 3.32E−06 |
| 199 - 281 | N199 | C281 | ING3_HUMAN - VP64 | 1.83424721 | 3.83E−06 |
| 307 - 284 | N307 | C284 | KYP - p65-HSF1 | 1.83327206 | 1.66E−05 |
| 258 - 296 | N258 | C296 | Nejire-HAT - HP1a | 1.83286832 | 0.00808945 |
| 285 - 142 | N285 | C142 | p65-MyoD - | 1.83205599 | 0.00620332 |
| | | | SMRC1_HUMAN | | |
| 237 - 285 | N237 | C285 | KAT5_HUMAN - p65-MyoD | 1.83083781 | 4.91E−04 |
| 282 - 120 | N282 | C120 | VP160 - RING1_HUMAN | 1.83074624 | 2.62E−06 |
| 190 - 285 | N190 | C285 | ANM1_HUMAN - p65-MyoD | 1.82848444 | 1.18E−04 |
| 282 - 90 | N282 | C90 | VP160 - CHD4_HUMAN | 1.82839936 | 2.34E−06 |
| 281 - 69 | N281 | C69 | VP64 - SETB2_HUMAN | 1.82754346 | 3.84E−04 |
| 285 - 107 | N285 | C107 | p65-MyoD - | 1.82751287 | 0.00352436 |
| | | | KAT6B_HUMAN | | |
| 295 - 291 | N295 | C291 | SET-TAF1B - SS18 | 1.82724402 | 0.00403799 |
| 127 - 35 | N127 | C35 | SETMR_HUMAN - | 1.82711187 | 0.00766029 |
| | | | VPR_JKNp64 | | |
| 218 - 284 | N218 | C284 | IN80B_HUMAN - p65-HSF1 | 1.82548448 | 0.00741477 |
| 282 - 197 | N282 | C197 | VP160 - SUV91_HUMAN | 1.82374264 | 2.01E−04 |
| 9 - 281 | N9 | C281 | MECP2 - VP64 | 1.82363707 | 6.19E−06 |
| 35 - 164 | N35 | C164 | VPR_JKNp64 - | 1.8230199 | 2.51E−04 |
| | | | SIR5_HUMAN | | |
| 282 - 87 | N282 | C87 | VP160 - SETD7_HUMAN | 1.82208175 | 7.10E−05 |
| 294 - 14 | N294 | C14 | DIM5 - RELA | 1.82191351 | 0.0049491 |
| 281 - 326 | N281 | C326 | VP64 - pf_Sir2A | 1.82186314 | 1.15E−04 |
| 35 - 130 | N35 | C130 | VPR_JKNp64 - | 1.82181271 | 6.06E−05 |
| | | | PRDM2_HUMAN | | |
| 329 - 35 | N329 | C35 | pbcv1_vSET - VPR_JKNp64 | 1.82116633 | 4.58E−04 |
| 313 - 250 | N313 | C250 | SaII - HCFC1_HUMAN | 1.81967008 | 0.0091944 |
| 226 - 285 | N226 | C285 | SETD2_HUMAN - p65- | 1.81894825 | 2.53E−04 |
| | | | MyoD | | |
| 282 - 103 | N282 | C103 | VP160 - B4DKA4_HUMAN | 1.81770167 | 1.13E−05 |
| 90 - 150 | N90 | C150 | CHD4_HUMAN - | 1.81617181 | 0.00433672 |
| | | | HDA11_HUMAN | | |
| 24 - 14 | N24 | C14 | CTCFL - RELA | 1.81552218 | 0.00760944 |
| 281 - 306 | N281 | C306 | VP64 - CobB | 1.81543525 | 1.23E−04 |
| 281 - 220 | N281 | C220 | VP64 - JARD2_HUMAN | 1.81435484 | 1.56E−06 |
| 282 - 171 | N282 | C171 | VP160 - ASH1L_HUMAN | 1.81385056 | 4.85E−04 |
| 281 - 88 | N281 | C88 | VP64 - ING4_HUMAN | 1.81220459 | 5.89E−04 |
| 263 - 83 | N263 | C83 | HDAC8 - SMRD3_HUMAN | 1.81134846 | 0.03569605 |
| 106 - 35 | N106 | C35 | KAT6B_HUMAN - | 1.81125691 | 9.11E−05 |
| | | | VPR_JKNp64 | | |
| 282 - 219 | N282 | C219 | VP160 - JARD2_HUMAN | 1.81121055 | 1.35E−06 |
| 322 - 284 | N322 | C284 | MINT_HUMAN - p65-HSF1 | 1.80982867 | 0.0066497 |
| 296 - 281 | N296 | C281 | HP1a - VP64 | 1.8091595 | 6.27E−04 |
| 35 - 90 | N35 | C90 | VPR_JKNp64 - | 1.80897204 | 4.52E−04 |
| | | | CHD4_HUMAN | | |
| 281 - 113 | N281 | C113 | VP64 - KDM5A_HUMAN | 1.80861183 | 1.26E−04 |
| 189 - 285 | N189 | C285 | ING2_HUMAN - p65-MyoD | 1.8069013 | 1.48E−05 |
| 241 - 281 | N241 | C281 | SIR2_HUMAN - VP64 | 1.80645078 | 4.54E−04 |
| 281 - 277 | N281 | C277 | VP64 - SUV39H1 | 1.80614376 | 9.19E−06 |
| 281 - 118 | N281 | C118 | VP64 - HDAC6_HUMAN | 1.80600318 | 1.94E−05 |
| 14 - 1 | N14 | C1 | RELA - SETD1A | 1.80432207 | 2.29E−05 |
| 92 - 284 | N92 | C284 | SMYD1_HUMAN - p65- | 1.80432157 | 0.0017116 |
| | | | HSF1 | | |
| 282 - 48 | N282 | C48 | VP160 - SETD5_HUMAN | 1.80350248 | 3.04E−04 |
| 280 - 10 | N280 | C10 | CBF1-Cterm - HSF1 | 1.80208077 | 5.79E−05 |
| 20 - 284 | N20 | C284 | KDM1B - p65-HSF1 | 1.80185388 | 0.0033478 |
| 212 - 35 | N212 | C35 | HDAC8_HUMAN - | 1.80003583 | 0.00629441 |
| | | | VPR_JKNp64 | | |
| 277 - 281 | N277 | C281 | SUV39H1 - VP64 | 1.79885683 | 0.00483 |
| 35 - 332 | N35 | C332 | VPR_JKNp64 - hs_SIRT5 | 1.79876749 | 0.00536171 |
| 282 - 335 | N282 | C335 | VP160 - at_SUVR4 | 1.79740023 | 8.60E−05 |
| 284 - 45 | N284 | C45 | p65-HSF1 - | 1.7961639 | 7.92E−05 |
| | | | KMT2D_HUMAN | | |
| 281 - 71 | N281 | C71 | VP64 - RUVB1_HUMAN | 1.79600343 | 0.00672704 |
| 270 - 136 | N270 | C136 | ENL - JMJD6_HUMAN | 1.79527072 | 0.02511468 |
| 69 - 284 | N69 | C284 | SETB2_HUMAN - p65-HSF1 | 1.79460839 | 0.00030383 |
| 281 - 198 | N281 | C198 | VP64 - JMJD8_HUMAN | 1.79443956 | 8.90E−04 |
| 282 - 105 | N282 | C105 | VP160 - MBD2_HUMAN | 1.79267673 | 7.01E−05 |
| 285 - 306 | N285 | C306 | p65-MyoD - CobB | 1.79234691 | 0.00179337 |
| 200 - 106 | N200 | C106 | ARP5_HUMAN - | 1.79226015 | 0.0182875 |
| | | | KAT6B_HUMAN | | |
| 282 - 26 | N282 | C26 | VP160 - EZH1 | 1.79032041 | 1.97E−04 |
| 281 - 197 | N281 | C197 | VP64 - SUV91_HUMAN | 1.78975173 | 7.68E−04 |
| 285 - 186 | N285 | C186 | p65-MyoD - | 1.7882476 | 3.26E−05 |
| | | | RIOX2_HUMAN | | |
| 35 - 154 | N35 | C154 | VPR_JKNp64 - | 1.78715859 | 0.00574242 |
| | | | NSD2_HUMAN | | |
| 117 - 285 | N117 | C285 | HDAC6_HUMAN - p65- | 1.78674688 | 0.00549398 |
| | | | MyoD | | |
| 284 - 140 | N284 | C140 | p65-HSF1 - | 1.78622683 | 0.03080356 |
| | | | KDM6B_HUMAN | | |
| 14 - 199 | N14 | C199 | RELA - ING3_HUMAN | 1.78419314 | 0.001673 |
| 282 - 249 | N282 | C249 | VP160 - HAC1-HAT | 1.78363226 | 4.83E−05 |
| 284 - 231 | N284 | C231 | p65-HSF1 - | 1.78337713 | 0.01597079 |
| | | | KDM5B_HUMAN | | |
| 177 - 281 | N177 | C281 | KDM5C_HUMAN - VP64 | 1.78311927 | 6.12E−07 |
| 284 - 93 | N284 | C93 | p65-HSF1 - | 1.78310488 | 0.00158342 |
| | | | ACL6B_HUMAN | | |
| 285 - 134 | N285 | C134 | p65-MyoD - | 1.78208223 | 0.00174617 |
| | | | KDM2A_HUMAN | | |
| 35 - 294 | N35 | C294 | VPR_JKNp64 - DIM5 | 1.78075195 | 9.01E−05 |
| 281 - 102 | N281 | C102 | VP64 - TAF1_HUMAN | 1.78062433 | 0.00418935 |
| 76 - 281 | N76 | C281 | KDM5D_HUMAN - VP64 | 1.78051773 | 3.02E−04 |
| 282 - 241 | N282 | C241 | VP160 - SIR2_HUMAN | 1.77893025 | 1.11E−04 |
| 285 - 123 | N285 | C123 | p65-MyoD - | 1.77659817 | 7.27E−05 |
| | | | KMT2A_HUMAN | | |
| 230 - 257 | N230 | C257 | NFRKB_HUMAN - c-Myb- | 1.77643114 | 0.00903357 |
| | | | TAD | | |
| 282 - 37 | N282 | C37 | VP160 - KDM6A | 1.77529422 | 6.36E−06 |
| 281 - 264 | N281 | C264 | VP64 - MTL5_HUMAN | 1.77521046 | 1.98E−05 |
| 284 - 55 | N284 | C55 | p65-HSF1 - RBBP4_HUMAN | 1.77259613 | 8.94E−05 |
| 45 - 103 | N45 | C103 | KMT2D_HUMAN - | 1.772591 | 0.03442124 |
| | | | B4DKA4_HUMAN | | |
| 177 - 231 | N177 | C231 | KDM5C_HUMAN - | 1.77205077 | 0.02725873 |
| | | | KDM5B_HUMAN | | |
| 281 - 185 | N281 | C185 | VP64 - RBBP7_HUMAN | 1.77197486 | 9.37E−04 |
| 10 - 257 | N10 | C257 | HSF1 - c-Myb-TAD | 1.77131998 | 0.01556991 |
| 126 - 281 | N126 | C281 | SETMR_HUMAN - VP64 | 1.77074814 | 5.33E−05 |
| 285 - 305 | N285 | C305 | p65-MyoD - NUE | 1.77074429 | 4.98E−05 |
| 252 - 106 | N252 | C106 | HCFC1_HUMAN - | 1.76864917 | 0.03224572 |
| | | | KAT6B_HUMAN | | |
| 284 - 87 | N284 | C87 | p65-HSF1 - SETD7_HUMAN | 1.76768546 | 1.28E−05 |
| 327 - 284 | N327 | C284 | hs_NIPP1 - p65-HSF1 | 1.76709128 | 1.44E−04 |
| 14 - 212 | N14 | C212 | RELA - HDAC8_HUMAN | 1.76612365 | 0.00145428 |
| 284 - 209 | N284 | C209 | p65-HSF1 - | 1.76347539 | 0.0196543 |
| | | | HDA10_HUMAN | | |
| 35 - 267 | N35 | C267 | VPR_JKNp64 - FOXA1- | 1.7612904 | 4.46E−05 |
| | | | Nterm | | |
| 285 - 102 | N285 | C102 | p65-MyoD - TAF1_HUMAN | 1.7606933 | 3.47E−04 |
| 99 - 257 | N99 | C257 | IN80C_HUMAN - c-Myb- | 1.75958344 | 7.95E−04 |
| | | | TAD | | |
| 63 - 10 | N63 | C10 | SMYD5_HUMAN - HSF1 | 1.7595776 | 0.0189079 |
| 202 - 281 | N202 | C281 | KDM2B_HUMAN - VP64 | 1.75814293 | 0.00106836 |
| 282 - 191 | N282 | C191 | VP160 - CDYL_HUMAN | 1.75624831 | 1.11E−05 |
| 35 - 133 | N35 | C133 | VPR_JKNp64 - | 1.75530833 | 3.50E−04 |
| | | | KAT8_HUMAN | | |
| 231 - 281 | N231 | C281 | KDM5B_HUMAN - VP64 | 1.75374262 | 4.92E−04 |
| 285 - 213 | N285 | C213 | p65-MyoD - | 1.75359987 | 7.48E−04 |
| | | | HBAP1_HUMAN | | |
| 111 - 1 | N111 | C1 | KDM5A_HUMAN - SETD1A | 1.75325104 | 0.02000885 |
| 35 - 320 | N35 | C320 | VPR_JKNp64 - mMLL3-SET | 1.7529317 | 2.19E−04 |
| 5 - 14 | N5 | C14 | KDM1A - RELA | 1.74930934 | 1.78E−04 |
| 285 - 138 | N285 | C138 | p65-MyoD - TFPT_HUMAN | 1.74917564 | 0.00115623 |
| 291 - 257 | N291 | C257 | SS18 - c-Myb-TAD | 1.74807573 | 0.04095836 |
| 218 - 297 | N218 | C297 | IN80B_HUMAN - MesoLo | 1.74642431 | 0.01472868 |
| 281 - 155 | N281 | C155 | VP64 - NSD2_HUMAN | 1.74459017 | 2.68E−04 |
| 200 - 329 | N200 | C329 | ARP5_HUMAN - | 1.74307285 | 0.02540272 |
| | | | pbcv1_vSET | | |
| 281 - 330 | N281 | C330 | VP64 - ce_Set1 | 1.74212222 | 1.88E−04 |
| 285 - 56 | N285 | C56 | p65-MyoD - | 1.74186614 | 7.18E−04 |
| | | | SUV92_HUMAN | | |
| 289 - 284 | N289 | C284 | FOG1 - p65-HSF1 | 1.74168934 | 4.64E−05 |
| 282 - 49 | N282 | C49 | VP160 - NCOA1_HUMAN | 1.74144519 | 2.04E−05 |
| 37 - 281 | N37 | C281 | KDM6A - VP64 | 1.74124366 | 0.00547291 |
| 281 - 122 | N281 | C122 | VP64 - KMT2A_HUMAN | 1.74044238 | 0.02995729 |
| 88 - 285 | N88 | C285 | ING4_HUMAN - p65-MyoD | 1.73951218 | 2.10E−06 |
| 282 - 67 | N282 | C67 | VP160 - PRDM9_HUMAN | 1.73558727 | 4.09E−04 |
| 233 - 328 | N233 | C328 | HINFP_HUMAN - hs_PHF19 | 1.73341944 | 0.03861139 |
| 114 - 285 | N114 | C285 | KDM5A_HUMAN - p65- | 1.73255843 | 0.00275052 |
| | | | MyoD | | |
| 282 - 183 | N282 | C183 | VP160 - KMT2C_HUMAN | 1.73246931 | 5.30E−05 |
| 301 - 214 | N301 | C214 | SIRT3 - HDAC4_HUMAN | 1.73122289 | 0.03935844 |
| 285 - 328 | N285 | C328 | p65-MyoD - hs_PHF19 | 1.73010096 | 2.21E−04 |
| 289 - 35 | N289 | C35 | FOG1 - VPR_JKNp64 | 1.72927428 | 2.48E−05 |
| 24 - 285 | N24 | C285 | CTCFL - p65-MyoD | 1.72878617 | 0.00455254 |
| 237 - 222 | N237 | C222 | KAT5_HUMAN - | 1.72866686 | 0.0218706 |
| | | | IN80E_HUMAN | | |
| 273 - 252 | N273 | C252 | PRDM9-CD - | 1.72866686 | 0.0218706 |
| | | | HCFC1_HUMAN | | |
| 284 - 136 | N284 | C136 | p65-HSF1 - JMJD6_HUMAN | 1.7279361 | 5.71E−05 |
| 285 - 297 | N285 | C297 | p65-MyoD - MesoLo | 1.72775179 | 2.42E−04 |
| 285 - 2 | N285 | C2 | p65-MyoD - SETD1A | 1.72671653 | 6.17E−04 |
| 281 - 322 | N281 | C322 | VP64 - MINT_HUMAN | 1.72584207 | 9.34E−04 |
| 116 - 250 | N116 | C250 | ANM6_HUMAN - | 1.72562579 | 0.00170487 |
| | | | HCFC1_HUMAN | | |
| 284 - 307 | N284 | C307 | p65-HSF1 - KYP | 1.72499647 | 1.06E−04 |
| 295 - 14 | N295 | C14 | SET-TAF1B - RELA | 1.72333284 | 6.95E−06 |
| 35 - 172 | N35 | C172 | VPR_JKNp64 - | 1.72305875 | 0.00319592 |
| | | | ASH1L_HUMAN | | |
| 281 - 301 | N281 | C301 | VP64 - SIRT3 | 1.72116698 | 5.67E−04 |
| 205 - 50 | N205 | C50 | JMJD7_HUMAN - | 1.72035183 | 0.02801431 |
| | | | NCOA1_HUMAN | | |
| 35 - 61 | N35 | C61 | VPR_JKNp64 - | 1.71917802 | 0.00424423 |
| | | | HAT1_HUMAN | | |
| 78- 10 | N78 | C10 | KAT6A_HUMAN - HSF1 | 1.71889669 | 1.14E−04 |
| 200 - 257 | N200 | C257 | ARP5_HUMAN - c-Myb- | 1.71845457 | 2.27E−04 |
| | | | TAD | | |
| 35 - 275 | N35 | C275 | VPR_JKNp64 - DOT1L- | 1.71831898 | 0.00122792 |
| | | | DOT1_domain | | |
| 284 - 102 | N284 | C102 | p65-HSF1 - TAF1_HUMAN | 1.71757112 | 0.0030378 |
| 120 - 284 | N120 | C284 | RING1_HUMAN - p65-HSF1 | 1.71492643 | 0.00552937 |
| 281 - 338 | N281 | C338 | VP64 - RBM15_HUMAN | 1.71383592 | 0.01267639 |
| 21 - 14 | N21 | C14 | KDM1B - RELA | 1.71231662 | 0.00344785 |
| 111 - 10 | N111 | C10 | KDM5A_HUMAN - HSF1 | 1.71116012 | 0.00180243 |
| 253 - 278 | N253 | C278 | RBBP5_HUMAN - TET2CD | 1.7110399 | 0.01073171 |
| 91 - 14 | N91 | C14 | ANM5_HUMAN - RELA | 1.70867464 | 0.00931089 |
| 281 - 90 | N281 | C90 | VP64 - CHD4_HUMAN | 1.70787063 | 3.98E−05 |
| 282 - 134 | N282 | C134 | VP160 - KDM2A_HUMAN | 1.70773753 | 1.83E−04 |
| 284 - 134 | N284 | C134 | p65-HSF1 - | 1.70690765 | 0.0078851 |
| | | | KDM2A_HUMAN | | |
| 335 - 281 | N335 | C281 | at_SUVR4 - VP64 | 1.70639125 | 3.23E−04 |
| 14 - 149 | N14 | C149 | RELA - MBD1_HUMAN | 1.70516594 | 0.00797795 |
| 281 - 254 | N281 | C254 | VP64 - MEN1_HUMAN | 1.70497475 | 1.52E−04 |
| 285 - 87 | N285 | C87 | p65-MyoD - | 1.70497093 | 4.81E−04 |
| | | | SETD7_HUMAN | | |
| 281 - 176 | N281 | C176 | VP64 - ARP8_HUMAN | 1.70493717 | 0.00231242 |
| 269 - 35 | N269 | C35 | PU.1 - VPR_JKNp64 | 1.70323209 | 0.02694294 |
| 35 - 25 | N35 | C25 | VPR_JKNp64 - CTCFL | 1.7002713 | 0.02936786 |
| 282 - 235 | N282 | C235 | VP160 - CARM1_HUMAN | 1.6991373 | 0.04270499 |
| 217 - 285 | N217 | C285 | CHRC1_HUMAN - p65- | 1.69853428 | 6.62E−04 |
| | | | MyoD | | |
| 263 - 327 | N263 | C327 | HDAC8 - hs_NIPP1 | 1.69821826 | 0.02665714 |
| 285 - 24 | N285 | C24 | p65-MyoD - CTCFL | 1.69622818 | 1.13E−04 |
| 64 - 14 | N64 | C14 | HDAC2_HUMAN - RELA | 1.69492672 | 6.82E−04 |
| 79 - 284 | N79 | C284 | KAT6A_HUMAN - p65- | 1.692103 | 0.00525727 |
| | | | HSF1 | | |
| 285 - 79 | N285 | C79 | p65-MyoD - | 1.69158207 | 4.92E−04 |
| | | | KAT6A_HUMAN | | |
| 164 - 14 | N164 | C14 | SIR5_HUMAN - RELA | 1.69078588 | 2.05E−04 |
| 282 - 185 | N282 | C185 | VP160 - RBBP7_HUMAN | 1.69062218 | 0.00159386 |
| 310 - 257 | N310 | C257 | TgSET8 - c-Myb-TAD | 1.68990283 | 3.21E−06 |
| 281 - 307 | N281 | C307 | VP64 - KYP | 1.68855927 | 1.22E−05 |
| 14 - 339 | N14 | C339 | RELA - SPOC1_HUMAN | 1.68798305 | 0.00917492 |
| 114 - 99 | N114 | C99 | KDM5A_HUMAN - | 1.68716029 | 0.01099815 |
| | | | IN80C_HUMAN | | |
| 282 - 126 | N282 | C126 | VP160 - SETMR_HUMAN | 1.68708038 | 7.00E−05 |
| 285 - 299 | N285 | C299 | p65-MyoD - HST2 | 1.68672508 | 2.55E−04 |
| 138 - 14 | N138 | C14 | TFPT_HUMAN - RELA | 1.6847774 | 5.14E−04 |
| 285 - 25 | N285 | C25 | p65-MyoD - CTCFL | 1.68342718 | 2.34E−04 |
| 263 - 281 | N263 | C281 | HDAC8 - VP64 | 1.68231937 | 0.00263016 |
| 281 - 270 | N281 | C270 | VP64 - ENL | 1.68133686 | 4.25E−05 |
| 345 - 257 | N345 | C257 | MSX2_HUMAN - c-Myb- | 1.6811097 | 0.00605768 |
| | | | TAD | | |
| 282 - 312 | N282 | C312 | VP160 - SetD8 | 1.6803134 | 1.74E−05 |
| 281 - 188 | N281 | C188 | VP64 - SMYD4_HUMAN | 1.68003596 | 4.06E−04 |
| 150 - 10 | N150 | C10 | HDA11_HUMAN - HSF1 | 1.67909331 | 0.00970366 |
| 285 - 324 | N285 | C324 | p65-MyoD - LBR_HUMAN | 1.67874657 | 3.56E−06 |
| 126 - 14 | N126 | C14 | SETMR_HUMAN - RELA | 1.67776234 | 0.02697726 |
| 281 - 112 | N281 | C112 | VP64 - KDM5A_HUMAN | 1.67765822 | 8.48E−06 |
| 285 - 198 | N285 | C198 | p65-MyoD - | 1.6770391 | 2.30E−04 |
| | | | JMJD8_HUMAN | | |
| 284 - 95 | N284 | C95 | p65-HSF1 - SETD6_HUMAN | 1.67695456 | 0.00844105 |
| 14 - 66 | N14 | C66 | RELA - DOT1L_HUMAN | 1.67687566 | 0.0018241 |
| 112 - 284 | N112 | C284 | KDM5A_HUMAN - p65- | 1.67611741 | 0.00284385 |
| | | | HSF1 | | |
| 35 - 20 | N35 | C20 | VPR_JKNp64 - KDM1B | 1.67591494 | 0.00406447 |
| 150 - 284 | N150 | C284 | HDA11_HUMAN - p65- | 1.67487746 | 0.01251004 |
| | | | HSF1 | | |
| 277 - 100 | N277 | C100 | SUV39H1 - TAF1_HUMAN | 1.67353386 | 0.03406724 |
| 150 - 95 | N150 | C95 | HDA11_HUMAN - | 1.67294107 | 0.02557864 |
| | | | SETD6_HUMAN | | |
| 116 - 284 | N116 | C284 | ANM6_HUMAN - p65-HSF1 | 1.6714248 | 0.00140593 |
| 284 - 349 | N284 | C349 | p65-HSF1 - DAM_N132A | 1.66934662 | 0.00302589 |
| 284 - 143 | N284 | C143 | p65-HSF1 - | 1.66342822 | 0.0186432 |
| | | | KDM4B_HUMAN | | |
| 284 - 346 | N284 | C346 | p65-HSF1 - MSX2_HUMAN | 1.6633899 | 1.93E−04 |
| 285 - 243 | N285 | C243 | p65-MyoD - | 1.66271374 | 0.00263288 |
| | | | DNMT1_HUMAN | | |
| 257 - 285 | N257 | C285 | c-Myb-TAD - p65-MyoD | 1.66239091 | 6.54E−04 |
| 282 - 169 | N282 | C169 | VP160 - ARI1B_HUMAN | 1.66153886 | 0.0020561 |
| 35 - 336 | N35 | C336 | VPR_JKNp64 - ce_Set4 | 1.66132651 | 0.00219419 |
| 290 - 35 | N290 | C35 | HP1aCS - VPR_JKNp64 | 1.66130099 | 7.29E−05 |
| 185 - 284 | N185 | C284 | RBBP7_HUMAN - p65-HSF1 | 1.6601862 | 5.43E−04 |
| 35 - 297 | N35 | C297 | VPR_JKNp64 - MesoLo | 1.65932126 | 1.26E−04 |
| 66 - 280 | N66 | C280 | DOT1L_HUMAN - CBF1- | 1.65852972 | 0.01725435 |
| | | | Cterm | | |
| 281 - 228 | N281 | C228 | VP64 - HDAC7_HUMAN | 1.6584989 | 0.00803167 |
| 268 - 10 | N268 | C10 | FOXA1-Cterm - HSF1 | 1.65474043 | 1.68E−05 |
| 126 - 174 | N126 | C174 | SETMR_HUMAN - | 1.65457126 | 0.03241956 |
| | | | HDAC1_HUMAN | | |
| 281 - 167 | N281 | C167 | VP64 - EHMT1_HUMAN | 1.65387259 | 0.00456773 |
| 281 - 9 | N281 | C9 | VP64 - MECP2 | 1.65195698 | 9.23E−04 |
| 282 - 206 | N282 | C206 | VP160 - SETD9_HUMAN | 1.65176102 | 3.21E−05 |
| 14 - 313 | N14 | C313 | RELA - SaII | 1.64972155 | 3.71E−06 |
| 282 - 272 | N282 | C272 | VP160 - Sir2 | 1.64930571 | 4.87E−06 |
| 281 - 53 | N281 | C53 | VP64 - CBP_HUMAN | 1.64782686 | 8.44E−05 |
| 281 - 126 | N281 | C126 | VP64 - SETMR_HUMAN | 1.6476088 | 4.39E−04 |
| 285 - 176 | N285 | C176 | p65-MyoD - ARP8_HUMAN | 1.6467121 | 0.00355448 |
| 14 - 189 | N14 | C189 | RELA - ING2_HUMAN | 1.64567944 | 0.00395706 |
| 285 - 335 | N285 | C335 | p65-MyoD - at_SUVR4 | 1.64549256 | 1.63E−04 |
| 35 - 246 | N35 | C246 | VPR_JKNp64 - | 1.64520095 | 7.30E−04 |
| | | | ATRX_HUMAN | | |
| 282 - 194 | N282 | C194 | VP160 - ING1_HUMAN | 1.6443527 | 4.94E−04 |
| 70 - 281 | N70 | C281 | SETB2_HUMAN - VP64 | 1.64420223 | 0.03722299 |
| 99 - 291 | N99 | C291 | IN80C_HUMAN - SS18 | 1.64300505 | 7.19E−04 |
| 29 - 269 | N29 | C269 | ASH2L - PU.1 | 1.64284427 | 0.01112722 |
| 284 - 171 | N284 | C171 | p65-HSF1 - ASH1L_HUMAN | 1.64082993 | 0.00880446 |
| 348 - 285 | N348 | C285 | BRDT_HUMAN - p65-MyoD | 1.64022697 | 0.00186883 |
| 21 - 284 | N21 | C284 | KDM1B - p65-HSF1 | 1.63961504 | 4.29E−04 |
| 282 - 137 | N282 | C137 | VP160 - DNM3B_HUMAN | 1.63849846 | 0.00224433 |
| 14 - 145 | N14 | C145 | RELA - UTY_HUMAN | 1.63780832 | 0.01813702 |
| 281 - 67 | N281 | C67 | VP64 - PRDM9_HUMAN | 1.63775112 | 6.71E−04 |
| 281 - 20 | N281 | C20 | VP64 - KDM1B | 1.63569425 | 7.04E−04 |
| 208 - 257 | N208 | C257 | ANM9_HUMAN - c-Myb- | 1.63554573 | 0.01834321 |
| | | | TAD | | |
| 35 - 250 | N35 | C250 | VPR_JKNp64 - | 1.63427975 | 0.00125466 |
| | | | HCFC1_HUMAN | | |
| 149 - 257 | N149 | C257 | MBD1_HUMAN - c-Myb- | 1.63357808 | 1.31E−04 |
| | | | TAD | | |
| 273 - 249 | N273 | C249 | PRDM9-CD - HAC1-HAT | 1.63320251 | 0.01749932 |
| 281 - 30 | N281 | C30 | VP64 - KDM3A | 1.63229475 | 0.00193938 |
| 114 - 45 | N114 | C45 | KDM5A_HUMAN - | 1.63164306 | 0.00771937 |
| | | | KMT2D_HUMAN | | |
| 282 - 240 | N282 | C240 | VP160 - ANM3_HUMAN | 1.63061704 | 2.19E−04 |
| 284 - 18 | N284 | C18 | p65-HSF1 - EZH2 | 1.63049367 | 0.00204732 |
| 35 - 88 | N35 | C88 | VPR_JKNp64 - | 1.6300445 | 0.00308248 |
| | | | ING4_HUMAN | | |
| 35 - 191 | N35 | C191 | VPR_JKNp64 - | 1.62972537 | 0.02121395 |
| | | | CDYL_HUMAN | | |
| 281 - 206 | N281 | C206 | VP64 - SETD9_HUMAN | 1.62925733 | 2.35E−04 |
| 138 - 5 | N138 | C5 | TFPT_HUMAN - KDM1A | 1.62916174 | 0.01927479 |
| 281 - 114 | N281 | C114 | VP64 - KDM5A_HUMAN | 1.62816188 | 0.00171256 |
| 281 - 85 | N281 | C85 | VP64 - SMYD3_HUMAN | 1.6274716 | 0.00100379 |
| 175 - 281 | N175 | C281 | RUVB2_HUMAN - VP64 | 1.62664591 | 0.00327078 |
| 281 - 335 | N281 | C335 | VP64 - at_SUVR4 | 1.6265467 | 0.00166962 |
| 85 - 73 | N85 | C73 | SMYD3_HUMAN - | 1.62597032 | 0.01677691 |
| | | | KDM5D_HUMAN | | |
| 284 - 272 | N284 | C272 | p65-HSF1 - Sir2 | 1.62401765 | 0.00159268 |
| 310 - 252 | N310 | C252 | TgSET8 - HCFC1_HUMAN | 1.62283752 | 0.02662876 |
| 282 - 182 | N282 | C182 | VP160 - MTA3_HUMAN | 1.62170623 | 0.00139933 |
| 281 - 189 | N281 | C189 | VP64 - ING2_HUMAN | 1.62128539 | 0.00179222 |
| 14 - 26 | N14 | C26 | RELA - EZH1 | 1.61874497 | 1.55E−05 |
| 270 - 257 | N270 | C257 | ENL - c-Myb-TAD | 1.61871994 | 3.90E−06 |
| 69 - 285 | N69 | C285 | SETB2_HUMAN - p65- | 1.61861548 | 0.00761912 |
| | | | MyoD | | |
| 59 - 301 | N59 | C301 | INO80_HUMAN - SIRT3 | 1.61742639 | 0.0064373 |
| 281 - 334 | N281 | C334 | VP64 - hs_RCOR1 | 1.61421966 | 0.00519875 |
| 285 - 320 | N285 | C320 | p65-MyoD - mMLL3-SET | 1.61403082 | 1.40E−04 |
| 269 - 14 | N269 | C14 | PU.1 - RELA | 1.61356952 | 6.02E−05 |
| 147 - 281 | N147 | C281 | NSD3_HUMAN - VP64 | 1.61346295 | 0.00104764 |
| 10 - 154 | N10 | C154 | HSF1 - NSD2_HUMAN | 1.61302484 | 0.02444388 |
| 133 - 281 | N133 | C281 | KAT8_HUMAN - VP64 | 1.61205682 | 0.00666349 |
| 186 - 14 | N186 | C14 | RIOX2_HUMAN - RELA | 1.61018728 | 3.19E−04 |
| 78 - 257 | N78 | C257 | KAT6A_HUMAN - c-Myb- | 1.60911167 | 0.04382889 |
| | | | TAD | | |
| 266 - 10 | N266 | C10 | GADD45A - HSF1 | 1.60814225 | 0.00885879 |
| 35 - 59 | N35 | C59 | VPR_JKNp64 - | 1.60624155 | 0.00291917 |
| | | | INO80_HUMAN | | |
| 10 - 285 | N10 | C285 | HSF1 - p65-MyoD | 1.60623767 | 0.02738816 |
| 26 - 35 | N26 | C35 | EZH1 - VPR_JKNp64 | 1.60599679 | 0.0236144 |
| 282 - 75 | N282 | C75 | VP160 - KDM5D_HUMAN | 1.60527347 | 5.42E−06 |
| 140 - 190 | N140 | C190 | KDM6B_HUMAN - | 1.60464308 | 0.03636406 |
| | | | ANM1_HUMAN | | |
| 250 - 14 | N250 | C14 | HCFC1_HUMAN - RELA | 1.60453474 | 0.00954869 |
| 307 - 285 | N307 | C285 | KYP - p65-MyoD | 1.60411799 | 4.78E−05 |
| 114 - 15 | N114 | C15 | KDM5A_HUMAN - EP300 | 1.60320025 | 0.0045969 |
| 332 - 281 | N332 | C281 | hs_SIRT5 - VP64 | 1.60269229 | 0.00388825 |
| 87 - 10 | N87 | C10 | SETD7_HUMAN - HSF1 | 1.60237948 | 0.00422193 |
| 269 - 285 | N269 | C285 | PU.1 - p65-MyoD | 1.60227135 | 6.68E−04 |
| 14 - 327 | N14 | C327 | RELA - hs_NIPP1 | 1.60207765 | 9.24E−04 |
| 35 - 189 | N35 | C189 | VPR_JKNp64 - | 1.60160251 | 3.01E−04 |
| | | | ING2_HUMAN | | |
| 14 - 164 | N14 | C164 | RELA - SIR5_HUMAN | 1.60130597 | 4.31E−05 |
| 281 - 314 | N281 | C314 | VP64 - MeCP2 | 1.60118639 | 2.11E−04 |
| 284 - 189 | N284 | C189 | p65-HSF1 - ING2_HUMAN | 1.60056812 | 0.00519757 |
| 281 - 240 | N281 | C240 | VP64 - ANM3_HUMAN | 1.60033425 | 8.13E−05 |
| 332 - 285 | N332 | C285 | hs_SIRT5 - p65-MyoD | 1.60002691 | 6.35E−04 |
| 306 - 257 | N306 | C257 | CobB - c-Myb-TAD | 1.60001496 | 1.45E−04 |
| 14 - 252 | N14 | C252 | RELA - HCFC1_HUMAN | 1.59827988 | 0.02714981 |
| 253 - 10 | N253 | C10 | RBBP5_HUMAN - HSF1 | 1.59802152 | 0.01813257 |
| 281 - 27 | N281 | C27 | VP64 - EZH1 | 1.59700232 | 0.00152283 |
| 281 - 265 | N281 | C265 | VP64 - EZH2 | 1.59557677 | 0.02689313 |
| 59 - 284 | N59 | C284 | INO80_HUMAN - p65-HSF1 | 1.59512805 | 0.0026829 |
| 281 - 39 | N281 | C39 | VP64 - KDM3A | 1.59187816 | 4.19E−04 |
| 35 - 9 | N35 | C9 | VPR_JKNp64 - MECP2 | 1.59180824 | 0.02746355 |
| 14 - 269 | N14 | C269 | RELA - PU.1 | 1.59067831 | 4.48E−05 |
| 216 - 45 | N216 | C45 | ING5_HUMAN - | 1.59045251 | 0.01420661 |
| | | | KMT2D_HUMAN | | |
| 284 - 12 | N284 | C12 | p65-HSF1 - KMT2A | 1.58985245 | 0.01934908 |
| 252 - 326 | N252 | C326 | HCFC1_HUMAN - pf_Sir2A | 1.58972875 | 0.00468021 |
| 295 - 240 | N295 | C240 | SET-TAF1B - | 1.58967039 | 0.03447189 |
| | | | ANM3_HUMAN | | |
| 281 - 43 | N281 | C43 | VP64 - SETD4_HUMAN | 1.58842388 | 6.14E−05 |
| 33 - 105 | N33 | C105 | Hilton_2015 - | 1.58838078 | 0.00363636 |
| | | | MBD2_HUMAN | | |
| 46 - 14 | N46 | C14 | SMRD1_HUMAN - RELA | 1.58834631 | 0.02795695 |
| 162 - 285 | N162 | C285 | SIR6_HUMAN - p65-MyoD | 1.58800471 | 5.96E−04 |
| 35 - 299 | N35 | C299 | VPR_JKNp64 - HST2 | 1.58728818 | 0.00121837 |
| 284 - 235 | N284 | C235 | p65-HSF1 - | 1.58696951 | 0.04380174 |
| | | | CARM1_HUMAN | | |
| 281 - 236 | N281 | C236 | VP64 - KAT2A_HUMAN | 1.58663744 | 0.04328424 |
| 285 - 122 | N285 | C122 | p65-MyoD - | 1.58653083 | 0.02013649 |
| | | | KMT2A_HUMAN | | |
| 17 - 171 | N17 | C171 | EZH2 - ASH1L_HUMAN | 1.58588401 | 0.04869337 |
| 257 - 10 | N257 | C10 | c-Myb-TAD - HSF1 | 1.58578646 | 7.52E−05 |
| 282 - 325 | N282 | C325 | VP160 - LBR_HUMAN | 1.58509327 | 0.01361873 |
| 38 - 284 | N38 | C284 | EHMT2 - p65-HSF1 | 1.58478541 | 4.26E−04 |
| 284 - 56 | N284 | C56 | p65-HSF1 - SUV92_HUMAN | 1.5844657 | 0.01585973 |
| 281 - 214 | N281 | C214 | VP64 - HDAC4_HUMAN | 1.58394929 | 9.34E−06 |
| 282 - 274 | N282 | C274 | VP160 - UBE2A | 1.58377603 | 7.22E−05 |
| 281 - 255 | N281 | C255 | VP64 - EED_HUMAN | 1.58333623 | 2.06E−04 |
| 14 - 249 | N14 | C249 | RELA - HAC1-HAT | 1.58055623 | 3.78E−05 |
| 349 - 35 | N349 | C35 | DAM_N132A - VPR_JKNp64 | 1.57969914 | 0.00114422 |
| 294 - 281 | N294 | C281 | DIM5 - VP64 | 1.57961703 | 4.22E−04 |
| 280 - 102 | N280 | C102 | CBF1-Cterm - | 1.57944154 | 0.03878189 |
| | | | TAF1_HUMAN | | |
| 71 -281 | N71 | C281 | RUVB1_HUMAN - VP64 | 1.57920896 | 0.0014375 |
| 282 - 231 | N282 | C231 | VP160 - KDM5B_HUMAN | 1.57741171 | 3.06E−04 |
| 149 - 285 | N149 | C285 | MBD1_HUMAN - p65-MyoD | 1.57713849 | 0.00307848 |
| 218 - 54 | N218 | C54 | IN80B_HUMAN - | 1.576874 | 0.01850924 |
| | | | CBP_HUMAN | | |
| 285 - 111 | N285 | C111 | p65-MyoD - | 1.57672231 | 3.70E−05 |
| | | | KDM5A_HUMAN | | |
| 138 - 267 | N138 | C267 | TFPT_HUMAN - FOXA1- | 1.57407283 | 0.02474032 |
| | | | Nterm | | |
| 284 - 320 | N284 | C320 | p65-HSF1 - mMLL3-SET | 1.57377752 | 7.18E−05 |
| 189 - 14 | N189 | C14 | ING2_HUMAN - RELA | 1.57139325 | 0.00805675 |
| 285 - 131 | N285 | C131 | p65-MyoD - | 1.57027792 | 0.04492886 |
| | | | PRDM2_HUMAN | | |
| 284 - 326 | N284 | C326 | p65-HSF1 - pf_Sir2A | 1.56954065 | 0.00312923 |
| 88 - 265 | N88 | C265 | ING4_HUMAN - EZH2 | 1.56946612 | 0.03766659 |
| 306 - 285 | N306 | C285 | CobB - p65-MyoD | 1.5685524 | 5.45E−04 |
| 281 - 192 | N281 | C192 | VP64 - JHD2C_HUMAN | 1.56764892 | 0.00232387 |
| 257 - 14 | N257 | C14 | c-Myb-TAD - RELA | 1.56552121 | 0.00321302 |
| 313 - 54 | N313 | C54 | SaII - CBP_HUMAN | 1.56258862 | 0.04634094 |
| 285 - 222 | N285 | C222 | p65-MyoD - IN80E_HUMAN | 1.56074994 | 1.53E−04 |
| 25 - 285 | N25 | C285 | CTCFL - p65-MyoD | 1.55999856 | 7.76E−04 |
| 282 - 277 | N282 | C277 | VP160 - SUV39H1 | 1.55988342 | 0.00768639 |
| 14 - 332 | N14 | C332 | RELA - hs_SIRT5 | 1.55968372 | 0.00402291 |
| 110 - 285 | N110 | C285 | JMJD4_HUMAN - p65- | 1.55953256 | 0.01422648 |
| | | | MyoD | | |
| 14 - 288 | N14 | C288 | RELA - SUV[SET] | 1.5569087 | 6.42E−04 |
| 216 - 250 | N216 | C250 | ING5_HUMAN - | 1.55592826 | 0.01303981 |
| | | | HCFC1_HUMAN | | |
| 27 - 252 | N27 | C252 | EZH1 - HCFC1_HUMAN | 1.55531432 | 0.01050977 |
| 285 - 294 | N285 | C294 | p65-MyoD - DIM5 | 1.55523886 | 4.76E−04 |
| 59 - 63 | N59 | C63 | INO80_HUMAN - | 1.55404628 | 0.01110993 |
| | | | SMYD5_HUMAN | | |
| 253 - 136 | N253 | C136 | RBBP5_HUMAN - | 1.55311702 | 0.03878908 |
| | | | JMJD6_HUMAN | | |
| 328 - 284 | N328 | C284 | hs_PHF19 - p65-HSF1 | 1.55222662 | 0.00107071 |
| 35 - 301 | N35 | C301 | VPR_JKNp64 - SIRT3 | 1.55168331 | 0.00536336 |
| 284 - 301 | N284 | C301 | p65-HSF1 - SIRT3 | 1.55134381 | 7.91E−04 |
| 285 - 34 | N285 | C34 | p65-MyoD - DNMT3A- | 1.55122556 | 0.00513144 |
| | | | 3L_JKNp112 | | |
| 255 - 281 | N255 | C281 | EED_HUMAN - VP64 | 1.55112044 | 0.00140195 |
| 35 - 7 | N35 | C7 | VPR_JKNp64 - ZNF10 | 1.55056823 | 0.01193903 |
| 284 - 273 | N284 | C273 | p65-HSF1 - PRDM9-CD | 1.54956461 | 0.00225928 |
| 269 - 257 | N269 | C257 | PU.1 - c-Myb-TAD | 1.5494266 | 0.00145299 |
| 284 - 26 | N284 | C26 | p65-HSF1 - EZH1 | 1.5493312 | 8.44E−04 |
| 252 - 85 | N252 | C85 | HCFC1_HUMAN - | 1.5490757 | 0.02633885 |
| | | | SMYD3_HUMAN | | |
| 144 - 14 | N144 | C14 | UTY_HUMAN - RELA | 1.54711201 | 0.00105905 |
| 281 - 276 | N281 | C276 | VP64 - EHMT2(G9a)-Cterm | 1.54500102 | 4.44E−05 |
| 35 - 127 | N35 | C127 | VPR_JKNp64 - | 1.5446824 | 0.00116845 |
| | | | SETMR_HUMAN | | |
| 257 - 284 | N257 | C284 | c-Myb-TAD - p65-HSF1 | 1.54374851 | 0.00251784 |
| 280 - 291 | N280 | C291 | CBF1-Cterm - SS18 | 1.54354187 | 1.90E−04 |
| 14 - 25 | N14 | C25 | RELA - CTCFL | 1.54255671 | 0.01494911 |
| 171 - 281 | N171 | C281 | ASH1L_HUMAN - VP64 | 1.54248753 | 0.00188905 |
| 226 - 257 | N226 | C257 | SETD2_HUMAN - c-Myb- | 1.5417356 | 4.92E−04 |
| | | | TAD | | |
| 269 - 284 | N269 | C284 | PU.1 - p65-HSF1 | 1.54139364 | 4.95E−05 |
| 268 - 14 | N268 | C14 | FOXA1-Cterm - RELA | 1.5378363 | 5.62E−05 |
| 14 - 275 | N14 | C275 | RELA - DOT1L- | 1.53705987 | 8.84E−04 |
| | | | DOT1_domain | | |
| 281 - 137 | N281 | C137 | VP64 - DNM3B_HUMAN | 1.53669325 | 0.00558619 |
| 212 - 263 | N212 | C263 | HDAC8_HUMAN - HDAC8 | 1.53647717 | 0.04662314 |
| 34 - 281 | N34 | C281 | DNMT3A-3L_JKNp112 - | 1.53590499 | 0.02534546 |
| | | | VP64 | | |
| 63 - 284 | N63 | C284 | SMYD5_HUMAN - p65- | 1.53583403 | 0.00135382 |
| | | | HSF1 | | |
| 14 - 305 | N14 | C305 | RELA - NUE | 1.53528625 | 1.34E−04 |
| 285 - 300 | N285 | C300 | p65-MyoD - SIRT6 | 1.53345889 | 8.19E−04 |
| 105 - 35 | N105 | C35 | MBD2_HUMAN - | 1.53326515 | 0.01880264 |
| | | | VPR_JKNp64 | | |
| 252 - 250 | N252 | C250 | HCFC1_HUMAN - | 1.53174409 | 0.00906374 |
| | | | HCFC1_HUMAN | | |
| 123 - 285 | N123 | C285 | KMT2A_HUMAN - p65- | 1.53169304 | 0.0030248 |
| | | | MyoD | | |
| 15 - 290 | N15 | C290 | EP300 - HP1aCS | 1.53017234 | 0.00131846 |
| 14 - 176 | N14 | C176 | RELA - ARP8_HUMAN | 1.52907944 | 0.00464082 |
| 282 - 60 | N282 | C60 | VP160 - INO80_HUMAN | 1.52603533 | 0.00860228 |
| 285 - 149 | N285 | C149 | p65-MyoD - MBD1_HUMAN | 1.5255623 | 0.00300666 |
| 306 - 10 | N306 | C10 | CobB - HSF1 | 1.52515453 | 0.00420098 |
| 344 - 83 | N344 | C83 | HDAC3_HUMAN - | 1.52404303 | 0.0458854 |
| | | | SMRD3_HUMAN | | |
| 14 - 294 | N14 | C294 | RELA - DIM5 | 1.52301593 | 3.71E−04 |
| 14 - 14 | N14 | C14 | RELA - RELA | 1.52216375 | 8.45E−05 |
| 1 - 285 | N1 | C285 | SETD1A - p65-MyoD | 1.52179859 | 0.01203858 |
| 14 - 198 | N14 | C198 | RELA - JMJD8_HUMAN | 1.52092846 | 2.67E−04 |
| 285 - 162 | N285 | C162 | p65-MyoD - SIR6_HUMAN | 1.52055289 | 5.05E−04 |
| 285 - 349 | N285 | C349 | p65-MyoD - DAM_N132A | 1.52039546 | 5.03E−04 |
| 85 - 10 | N85 | C10 | SMYD3_HUMAN - HSF1 | 1.52037052 | 0.00431254 |
| 35 - 97 | N35 | C97 | VPR_JKNp64 - | 1.51840767 | 0.01215036 |
| | | | CHD3_HUMAN | | |
| 74 - 20 | N74 | C20 | KDM5D_HUMAN - KDM1B | 1.51801672 | 0.0202217 |
| 257 - 291 | N257 | C291 | c-Myb-TAD - SS18 | 1.51616676 | 0.00808347 |
| 281 - 170 | N281 | C170 | VP64 - NSD1_HUMAN | 1.51577299 | 0.03237031 |
| 114 - 257 | N114 | C257 | KDM5A_HUMAN - c-Myb- | 1.51523787 | 6.79E−04 |
| | | | TAD | | |
| 282 - 159 | N282 | C159 | VP160 - SETB1_HUMAN | 1.51464827 | 2.71E−04 |
| 298 - 281 | N298 | C281 | MBD2b - VP64 | 1.51282906 | 0.00399473 |
| 25 - 250 | N25 | C250 | CTCFL - HCFC1_HUMAN | 1.51000871 | 0.00305979 |
| 35 - 73 | N35 | C73 | VPR_JKNp64 - | 1.50955712 | 1.15E−04 |
| | | | KDM5D_HUMAN | | |
| 18 - 257 | N18 | C257 | EZH2 - c-Myb-TAD | 1.50753455 | 7.55E−04 |
| 285 - 216 | N285 | C216 | p65-MyoD - ING5_HUMAN | 1.50730534 | 0.01900918 |
| 285 - 118 | N285 | C118 | p65-MyoD - | 1.5063705 | 0.00159123 |
| | | | HDAC6_HUMAN | | |
| 35 - 120 | N35 | C120 | VPR_JKNp64 - | 1.50545472 | 0.01242782 |
| | | | RING1_HUMAN | | |
| 285 - 330 | N285 | C330 | p65-MyoD - ce_Set1 | 1.50336663 | 0.00183188 |
| 5 - 280 | N5 | C280 | KDM1A - CBF1-Cterm | 1.50319364 | 0.03392263 |
| 239 - 176 | N239 | C176 | KDM8_HUMAN - | 1.50216757 | 0.04233754 |
| | | | ARP8_HUMAN | | |
| 273 - 107 | N273 | C107 | PRDM9-CD - | 1.50047056 | 0.03529449 |
| | | | KAT6B_HUMAN | | |
| 14 - 290 | N14 | C290 | RELA - HP1aCS | 1.50012614 | 3.95E−05 |
| 330 - 281 | N330 | C281 | ce_Set1 - VP64 | 1.49938209 | 0.01044499 |
| 245 - 285 | N245 | C285 | TYY1_HUMAN - p65-MyoD | 1.49934092 | 0.00179762 |
| 83 - 273 | N83 | C273 | SMRD3_HUMAN - PRDM9- | 1.49932717 | 0.03694386 |
| | | | CD | | |
| 194 - 14 | N194 | C14 | ING1_HUMAN - RELA | 1.49923731 | 0.00300279 |
| 119 - 281 | N119 | C281 | ACL6A_HUMAN - VP64 | 1.49855159 | 0.00672128 |
| 85 - 284 | N85 | C284 | SMYD3_HUMAN - p65- | 1.49751144 | 0.02060346 |
| | | | HSF1 | | |
| 73 - 14 | N73 | C14 | KDM5D_HUMAN - RELA | 1.49498269 | 8.40E−05 |
| 135 - 14 | N135 | C14 | KDM2A_HUMAN - RELA | 1.49454647 | 0.01537235 |
| 285 - 240 | N285 | C240 | p65-MyoD - ANM3_HUMAN | 1.49407286 | 0.0424921 |
| 285 - 329 | N285 | C329 | p65-MyoD - pbcv1_vSET | 1.49299934 | 8.44E−04 |
| 281 - 132 | N281 | C132 | VP64 - PRDM2_HUMAN | 1.49224771 | 0.00176866 |
| 118 - 285 | N118 | C285 | HDAC6_HUMAN - p65- | 1.49204918 | 0.02441575 |
| | | | MyoD | | |
| 99 - 285 | N99 | C285 | IN80C_HUMAN - p65-MyoD | 1.49201866 | 0.00427285 |
| 237 - 162 | N237 | C162 | KAT5_HUMAN - | 1.49166806 | 0.01728096 |
| | | | SIR6_HUMAN | | |
| 164 - 285 | N164 | C285 | SIR5_HUMAN - p65-MyoD | 1.49054212 | 0.03914761 |
| 258 - 250 | N258 | C250 | Nejire-HAT - | 1.49037671 | 0.02344268 |
| | | | HCFC1_HUMAN | | |
| 300 - 10 | N300 | C10 | SIRT6 - HSF1 | 1.48888622 | 0.00383335 |
| 271 - 35 | N271 | C35 | GCN5 - VPR_JKNp64 | 1.48801463 | 0.03083084 |
| 218 - 118 | N218 | C118 | IN80B_HUMAN - | 1.48795715 | 0.01848906 |
| | | | HDAC6_HUMAN | | |
| 53 -281 | N53 | C281 | CBP_HUMAN - VP64 | 1.4876408 | 1.09E−04 |
| 5 - 257 | N5 | C257 | KDM1A - c-Myb-TAD | 1.48682905 | 0.01417685 |
| 285 - 271 | N285 | C271 | p65-MyoD - GCN5 | 1.48662533 | 0.00219323 |
| 134 - 250 | N134 | C250 | KDM2A_HUMAN - | 1.48443 | 0.04987611 |
| | | | HCFC1_HUMAN | | |
| 35 - 26 | N35 | C26 | VPR_JKNp64 - EZH1 | 1.48420774 | 8.90E−04 |
| 250 - 212 | N250 | C212 | HCFC1_HUMAN - | 1.48255878 | 0.01980637 |
| | | | HDAC8_HUMAN | | |
| 14 - 333 | N14 | C333 | RELA - sc_RPD3 | 1.48077513 | 0.01110163 |
| 48 - 35 | N48 | C35 | SETD5_HUMAN - | 1.48053238 | 1.79E−04 |
| | | | VPR_JKNp64 | | |
| 282 - 344 | N282 | C344 | VP160 - HDAC3_HUMAN | 1.47956399 | 2.97E−04 |
| 284 - 79 | N284 | C79 | p65-HSF1 - | 1.47937717 | 0.00564387 |
| | | | KAT6A_HUMAN | | |
| 26 - 284 | N26 | C284 | EZH1 - p65-HSF1 | 1.47819365 | 0.002487 |
| 63 - 14 | N63 | C14 | SMYD5_HUMAN - RELA | 1.47708024 | 0.00154289 |
| 300 - 284 | N300 | C284 | SIRT6 - p65-HSF1 | 1.47256103 | 0.02141407 |
| 14 - 8 | N14 | C8 | RELA - MECP2 | 1.46994754 | 4.55E−04 |
| 277 - 280 | N277 | C280 | SUV39H1 - CBF1-Cterm | 1.46986191 | 0.01338292 |
| 275 - 14 | N275 | C14 | DOT1L-DOT1_domain - | 1.46927788 | 0.03054786 |
| | | | RELA | | |
| 207 - 257 | N207 | C257 | KDM1B_HUMAN - c-Myb- | 1.46823706 | 0.00217306 |
| | | | TAD | | |
| 18 - 285 | N18 | C285 | EZH2 - p65-MyoD | 1.46769001 | 0.04023973 |
| 285 - 100 | N285 | C100 | p65-MyoD - TAF1_HUMAN | 1.46688171 | 0.00234777 |
| 83 - 2 | N83 | C2 | SMRD3_HUMAN - SETD1A | 1.46554009 | 0.03043132 |
| 284 - 271 | N284 | C271 | p65-HSF1 - GCN5 | 1.46534595 | 0.00282377 |
| 285 - 26 | N285 | C26 | p65-MyoD - EZH1 | 1.46424914 | 1.19E−04 |
| 178 - 285 | N178 | C285 | KMT5C_HUMAN - p65- | 1.46291428 | 0.01978442 |
| | | | MyoD | | |
| 282 - 322 | N282 | C322 | VP160 - MINT_HUMAN | 1.46274344 | 0.00266918 |
| 285 - 229 | N285 | C229 | p65-MyoD - | 1.46204123 | 9.21E−04 |
| | | | NFRKB_HUMAN | | |
| 66 - 145 | N66 | C145 | DOT1L_HUMAN - | 1.4616684 | 0.04025443 |
| | | | UTY_HUMAN | | |
| 285 - 22 | N285 | C22 | p65-MyoD - TET1 | 1.45967829 | 0.00768301 |
| 327 - 132 | N327 | C132 | hs_NIPP1 - | 1.45925219 | 0.01893385 |
| | | | PRDM2_HUMAN | | |
| 281 - 6 | N281 | C6 | VP64 - KDM1A | 1.45886179 | 0.01642142 |
| 113 - 285 | N113 | C285 | KDM5A_HUMAN - p65- | 1.45704928 | 0.00570373 |
| | | | MyoD | | |
| 88 - 14 | N88 | C14 | ING4_HUMAN - RELA | 1.45640559 | 7.67E−04 |
| 1 - 291 | N1 | C291 | SETD1A - SS18 | 1.4562791 | 0.00110255 |
| 285 - 313 | N285 | C313 | p65-MyoD - SaII | 1.45519801 | 0.00333286 |
| 335 - 284 | N335 | C284 | at_SUVR4 - p65-HSF1 | 1.45508492 | 0.02096935 |
| 282 - 230 | N282 | C230 | VP160 - NFRKB_HUMAN | 1.454641 | 0.01585528 |
| 285 - 272 | N285 | C272 | p65-MyoD - Sir2 | 1.45382272 | 3.01E−04 |
| 285 - 143 | N285 | C143 | p65-MyoD - | 1.45265198 | 0.02493775 |
| | | | KDM4B_HUMAN | | |
| 282 - 200 | N282 | C200 | VP160 - ARP5_HUMAN | 1.45189008 | 0.00695816 |
| 348 - 42 | N348 | C42 | BRDT_HUMAN - | 1.45059008 | 0.0400898 |
| | | | KMT2E_HUMAN | | |
| 12 - 35 | N12 | C35 | KMT2A - VPR_JKNp64 | 1.44922331 | 0.01668561 |
| 76 - 285 | N76 | C285 | KDM5D_HUMAN - p65- | 1.44696202 | 0.04459597 |
| | | | MyoD | | |
| 149 - 284 | N149 | C284 | MBD1_HUMAN - p65-HSF1 | 1.44609667 | 0.01069147 |
| 281 - 23 | N281 | C23 | VP64 - TET1 | 1.44572924 | 0.01909298 |
| 14 - 113 | N14 | C113 | RELA - KDM5A_HUMAN | 1.44530943 | 0.0250035 |
| 35 - 326 | N35 | C326 | VPR_JKNp64 - pf_Sir2A | 1.44489311 | 0.01429182 |
| 200 - 136 | N200 | C136 | ARP5_HUMAN - | 1.44465797 | 0.01290881 |
| | | | JMJD6_HUMAN | | |
| 245 - 14 | N245 | C14 | TYY1_HUMAN - RELA | 1.44446967 | 0.04963582 |
| 297 - 214 | N297 | C214 | MesoLo - HDAC4_HUMAN | 1.4433783 | 0.04085094 |
| 332 - 10 | N332 | C10 | hs_SIRT5 - HSF1 | 1.44308899 | 0.00106633 |
| 38 - 266 | N38 | C266 | EHMT2 - GADD45A | 1.44300684 | 0.00939172 |
| 294 - 35 | N294 | C35 | DIM5 - VPR_JKNp64 | 1.44231491 | 0.04680469 |
| 253 - 281 | N253 | C281 | RBBP5_HUMAN - VP64 | 1.44224082 | 0.02492022 |
| 281 - 70 | N281 | C70 | VP64 - SETB2_HUMAN | 1.44221894 | 0.01381088 |
| 14 - 266 | N14 | C266 | RELA - GADD45A | 1.44214823 | 1.30E−04 |
| 25 - 14 | N25 | C14 | CTCFL - RELA | 1.442076 | 0.00314028 |
| 281 - 182 | N281 | C182 | VP64 - MTA3_HUMAN | 1.44152218 | 0.00623305 |
| 258 - 106 | N258 | C106 | Nejire-HAT - | 1.44140429 | 0.00871414 |
| | | | KAT6B_HUMAN | | |
| 285 - 20 | N285 | C20 | p65-MyoD - KDM1B | 1.44117144 | 0.00457481 |
| 284 - 107 | N284 | C107 | p65-HSF1 - | 1.44053915 | 0.00968076 |
| | | | KAT6B_HUMAN | | |
| 301 - 285 | N301 | C285 | SIRT3 - p65-MyoD | 1.43992607 | 0.00308223 |
| 252 - 233 | N252 | C233 | HCFC1_HUMAN - | 1.43887499 | 0.00519119 |
| | | | HINFP_HUMAN | | |
| 336 - 35 | N336 | C35 | ce_Set4 - VPR_JKNp64 | 1.4384217 | 0.00994079 |
| 309 - 35 | N309 | C35 | HDAC8 - VPR_JKNp64 | 1.43711775 | 0.00573444 |
| 66 - 99 | N66 | C99 | DOT1L_HUMAN - | 1.43296008 | 0.02522957 |
| | | | IN80C_HUMAN | | |
| 284 - 324 | N284 | C324 | p65-HSF1 - LBR_HUMAN | 1.43272147 | 5.99E−04 |
| 35 - 212 | N35 | C212 | VPR_JKNp64 - | 1.43132191 | 0.02016517 |
| | | | HDAC8_HUMAN | | |
| 281 - 93 | N281 | C93 | VP64 - ACL6B_HUMAN | 1.43124774 | 0.02165089 |
| 190 - 252 | N190 | C252 | ANM1_HUMAN - | 1.43024434 | 0.03972577 |
| | | | HCFC1_HUMAN | | |
| 296 - 285 | N296 | C285 | HP1a - p65-MyoD | 1.42970221 | 0.0050608 |
| 285 - 155 | N285 | C155 | p65-MyoD - NSD2_HUMAN | 1.42948205 | 0.01651686 |
| 281 - 302 | N281 | C302 | VP64 - HDAC11 | 1.4286805 | 2.50E−04 |
| 69 - 14 | N69 | C14 | SETB2_HUMAN - RELA | 1.42828357 | 2.65E−04 |
| 346 - 1 | N346 | C1 | MSX2_HUMAN - SETD1A | 1.4282463 | 0.03474915 |
| 281 - 231 | N281 | C231 | VP64 - KDM5B_HUMAN | 1.42700995 | 8.84E−04 |
| 345 - 14 | N345 | C14 | MSX2_HUMAN - RELA | 1.42683357 | 0.02857723 |
| 285 - 53 | N285 | C53 | p65-MyoD - CBP_HUMAN | 1.42676556 | 0.00464202 |
| 275 - 252 | N275 | C252 | DOT1L-DOT1_domain - | 1.42674789 | 0.01867902 |
| | | | HCFC1_HUMAN | | |
| 14 - 50 | N14 | C50 | RELA - NCOA1_HUMAN | 1.42634512 | 0.00642213 |
| 14 - 95 | N14 | C95 | RELA - SETD6_HUMAN | 1.42542863 | 0.02881434 |
| 299 - 285 | N299 | C285 | HST2 - p65-MyoD | 1.42541864 | 0.00313632 |
| 138 - 285 | N138 | C285 | TFPT_HUMAN - p65-MyoD | 1.42524662 | 0.00687258 |
| 284 - 182 | N284 | C182 | p65-HSF1 - MTA3_HUMAN | 1.42413613 | 0.04848941 |
| 242 - 267 | N242 | C267 | KAT2B_HUMAN - FOXA1- | 1.42374531 | 0.04466929 |
| | | | Nterm | | |
| 287 - 217 | N287 | C217 | G9A[SET] - | 1.42358584 | 0.03920295 |
| | | | CHRC1_HUMAN | | |
| 285 - 308 | N285 | C308 | p65-MyoD - HDT1 | 1.42289852 | 0.04394723 |
| 346 - 291 | N346 | C291 | MSX2_HUMAN - SS18 | 1.42011109 | 0.00171065 |
| 212 - 199 | N212 | C199 | HDAC8_HUMAN - | 1.41971467 | 0.02221756 |
| | | | ING3_HUMAN | | |
| 134 - 257 | N134 | C257 | KDM2A_HUMAN - c-Myb- | 1.41820141 | 0.00698328 |
| | | | TAD | | |
| 154 - 186 | N154 | C186 | NSD2_HUMAN - | 1.41781723 | 0.03855592 |
| | | | RIOX2_HUMAN | | |
| 78 - 335 | N78 | C335 | KAT6A_HUMAN - | 1.41711367 | 0.00855432 |
| | | | at_SUVR4 | | |
| 59 - 10 | N59 | C10 | INO80_HUMAN - HSF1 | 1.41666427 | 0.00628699 |
| 35 - 295 | N35 | C295 | VPR_JKNp64 - SET-TAF1B | 1.41665484 | 0.00393259 |
| 272 - 284 | N272 | C284 | Sir2 - p65-HSF1 | 1.41529334 | 0.024521 |
| 282 - 254 | N282 | C254 | VP160 - MEN1_HUMAN | 1.41474093 | 0.00452283 |
| 252 - 327 | N252 | C327 | HCFC1_HUMAN - hs_NIPP1 | 1.41395112 | 0.00902051 |
| 258 - 306 | N258 | C306 | Nejire-HAT - CobB | 1.4136598 | 0.01694461 |
| 91 - 326 | N91 | C326 | ANM5_HUMAN - pf_Sir2A | 1.41245654 | 0.01907974 |
| 7 - 281 | N7 | C281 | ZNF10 - VP64 | 1.41224932 | 0.03207402 |
| 282 - 72 | N282 | C72 | VP160 - KDM7A_HUMAN | 1.41200951 | 0.00128603 |
| 14 - 78 | N14 | C78 | RELA - KAT6A_HUMAN | 1.41189021 | 0.00443422 |
| 218 - 251 | N218 | C251 | IN80B_HUMAN - | 1.41188433 | 0.03120802 |
| | | | HCFC1_HUMAN | | |
| 20 - 281 | N20 | C281 | KDM1B - VP64 | 1.41161308 | 3.60E−04 |
| 281 - 238 | N281 | C238 | VP64 - NAT10_HUMAN | 1.41141674 | 0.01838922 |
| 154 - 333 | N154 | C333 | NSD2_HUMAN - sc_RPD3 | 1.41094782 | 0.01783571 |
| 189 - 257 | N189 | C257 | ING2_HUMAN - c-Myb- | 1.41046766 | 9.51E−04 |
| | | | TAD | | |
| 252 - 25 | N252 | C25 | HCFC1_HUMAN - CTCFL | 1.4104196 | 0.01246308 |
| 14 - 270 | N14 | C270 | RELA - ENL | 1.41000357 | 0.00222564 |
| 154 - 257 | N154 | C257 | NSD2_HUMAN - c-Myb- | 1.4096785 | 0.00312973 |
| | | | TAD | | |
| 282 - 196 | N282 | C196 | VP160 - MTA1_HUMAN | 1.40935538 | 0.02898047 |
| 282 - 79 | N282 | C79 | VP160 - KAT6A_HUMAN | 1.40899064 | 2.70E−04 |
| 233 - 14 | N233 | C14 | HINFP_HUMAN - RELA | 1.40789714 | 0.00233503 |
| 282 - 170 | N282 | C170 | VP160 - NSD1_HUMAN | 1.40723635 | 0.01399653 |
| 14 - 229 | N14 | C229 | RELA - NFRKB_HUMAN | 1.40697348 | 1.89E−04 |
| 14 - 98 | N14 | C98 | RELA - A4FU79_HUMAN | 1.40644841 | 2.16E−04 |
| 25 - 10 | N25 | C10 | CTCFL - HSF1 | 1.40430235 | 0.01648079 |
| 281 - 55 | N281 | C55 | VP64 - RBBP4_HUMAN | 1.40186512 | 0.00045126 |
| 14 - 63 | N14 | C63 | RELA - SMYD5_HUMAN | 1.40184944 | 0.00213421 |
| 151 - 257 | N151 | C257 | SIR7_HUMAN - c-Myb-TAD | 1.40110474 | 1.02E−04 |
| 35 - 348 | N35 | C348 | VPR_JKNp64 - | 1.40080706 | 0.04945669 |
| | | | BRDT_HUMAN | | |
| 313 - 291 | N313 | C291 | SaII - SS18 | 1.40063462 | 0.00701428 |
| 130 - 284 | N130 | C284 | PRDM2_HUMAN - p65- | 1.39945461 | 0.01980963 |
| | | | HSF1 | | |
| 97 - 281 | N97 | C281 | CHD3_HUMAN - VP64 | 1.39894767 | 0.01516921 |
| 205 - 14 | N205 | C14 | JMJD7_HUMAN - RELA | 1.39780826 | 5.94E−04 |
| 281 - 202 | N281 | C202 | VP64 - KDM2B_HUMAN | 1.39751189 | 5.80E−04 |
| 346 - 285 | N346 | C285 | MSX2_HUMAN - p65-MyoD | 1.39711038 | 0.00533335 |
| 284 - 145 | N284 | C145 | p65-HSF1 - UTY_HUMAN | 1.39683044 | 0.03449043 |
| 35 - 136 | N35 | C136 | VPR_JKNp64 - | 1.39629679 | 0.02506347 |
| | | | JMJD6_HUMAN | | |
| 77 - 257 | N77 | C257 | KDM5D_HUMAN - c-Myb- | 1.39537976 | 0.00240864 |
| | | | TAD | | |
| 114 - 10 | N114 | C10 | KDM5A_HUMAN - HSF1 | 1.39494976 | 0.01541978 |
| 271 - 38 | N271 | C38 | GCN5 - EHMT2 | 1.39396707 | 0.04155336 |
| 291 - 14 | N291 | C14 | SS18 - RELA | 1.39304089 | 0.03829349 |
| 285 - 21 | N285 | C21 | p65-MyoD - KDM1B | 1.39202055 | 0.02780167 |
| 285 - 76 | N285 | C76 | p65-MyoD - | 1.39198467 | 0.01278481 |
| | | | KDM5D_HUMAN | | |
| 285 - 296 | N285 | C296 | p65-MyoD - HP1a | 1.39191763 | 0.00188028 |
| 188 - 199 | N188 | C199 | SMYD4_HUMAN - | 1.39129137 | 0.04663814 |
| | | | ING3_HUMAN | | |
| 239 - 200 | N239 | C200 | KDM8_HUMAN - | 1.39109327 | 0.04797224 |
| | | | ARP5_HUMAN | | |
| 252 - 269 | N252 | C269 | HCFC1_HUMAN - PU.1 | 1.38981561 | 0.00406851 |
| 174 - 218 | N174 | C218 | HDAC1_HUMAN - | 1.38957713 | 0.02038141 |
| | | | IN80B_HUMAN | | |
| 281 - 191 | N281 | C191 | VP64 - CDYL_HUMAN | 1.38928955 | 0.00406054 |
| 315 - 285 | N315 | C285 | NCoR - p65-MyoD | 1.38918722 | 9.02E−04 |
| 281 - 109 | N281 | C109 | VP64 - KAT6B_HUMAN | 1.3887011 | 0.02813421 |
| 284 - 330 | N284 | C330 | p65-HSF1 - ce_Set1 | 1.38813758 | 0.00156605 |
| 61 - 14 | N61 | C14 | HAT1_HUMAN - RELA | 1.38769422 | 0.02523724 |
| 297 - 284 | N297 | C284 | MesoLo - p65-HSF1 | 1.38717861 | 0.02432778 |
| 217 - 339 | N217 | C339 | CHRC1_HUMAN - | 1.38712554 | 0.02129277 |
| | | | SPOC1_HUMAN | | |
| 282 - 155 | N282 | C155 | VP160 - NSD2_HUMAN | 1.38640868 | 0.00774988 |
| 83 - 257 | N83 | C257 | SMRD3_HUMAN - c-Myb- | 1.38458952 | 1.91E−04 |
| | | | TAD | | |
| 217 - 284 | N217 | C284 | CHRC1_HUMAN - p65- | 1.3844553 | 0.00314841 |
| | | | HSF1 | | |
| 14 - 301 | N14 | C301 | RELA - SIRT3 | 1.38368007 | 9.94E−04 |
| 14 - 319 | N14 | C319 | RELA - mCBP-HAT | 1.38357966 | 0.03282103 |
| 285 - 187 | N285 | C187 | p65-MyoD - MBD4_HUMAN | 1.38326982 | 0.00178139 |
| 32 - 33 | N32 | C33 | Gilbert_Lab_CRISPRi_KRAB - | 1.38303773 | 0.02861312 |
| | | | Hilton_2015 | | |
| 285 - 37 | N285 | C37 | p65-MyoD - KDM6A | 1.38186644 | 0.00814501 |
| 250 - 77 | N250 | C77 | HCFC1_HUMAN - | 1.38121585 | 0.03022882 |
| | | | KDM5D_HUMAN | | |
| 285 - 307 | N285 | C307 | p65-MyoD - KYP | 1.37978947 | 2.30E−04 |
| 14 - 12 | N14 | C12 | RELA - KMT2A | 1.37946107 | 0.00105643 |
| 285 - 214 | N285 | C214 | p65-MyoD - | 1.37921509 | 0.0103919 |
| | | | HDAC4_HUMAN | | |
| 107 - 35 | N107 | C35 | KAT6B_HUMAN - | 1.37805554 | 0.0294667 |
| | | | VPR_JKNp64 | | |
| 8 - 35 | N8 | C35 | MECP2 - VPR_JKNp64 | 1.37756205 | 0.01619403 |
| 15 - 250 | N15 | C250 | EP300 - HCFC1_HUMAN | 1.37746649 | 0.01259343 |
| 116 - 78 | N116 | C78 | ANM6_HUMAN - | 1.37735124 | 0.01968566 |
| | | | KAT6A_HUMAN | | |
| 38 - 333 | N38 | C333 | EHMT2 - sc_RPD3 | 1.37581811 | 0.01794391 |
| 114 - 269 | N114 | C269 | KDM5A_HUMAN - PU.1 | 1.37565995 | 0.04677597 |
| 212 - 257 | N212 | C257 | HDAC8_HUMAN - c-Myb- | 1.37435417 | 2.24E−04 |
| | | | TAD | | |
| 327 - 77 | N327 | C77 | hs_NIPP1 - | 1.37405394 | 0.02842579 |
| | | | KDM5D_HUMAN | | |
| 281 - 75 | N281 | C75 | VP64 - KDM5D_HUMAN | 1.37358689 | 0.00230994 |
| 282 - 309 | N282 | C309 | VP160 - HDAC8 | 1.37259268 | 0.01095896 |
| 297 - 14 | N297 | C14 | MesoLo - RELA | 1.37001376 | 0.00124942 |
| 35 - 111 | N35 | C111 | VPR_JKNp64 - | 1.36994891 | 0.00121177 |
| | | | KDM5A_HUMAN | | |
| 35 - 305 | N35 | C305 | VPR_JKNp64 - NUE | 1.36904442 | 4.30E−04 |
| 65 - 226 | N65 | C226 | MCRS1_HUMAN - | 1.36884593 | 0.04303744 |
| | | | SETD2_HUMAN | | |
| 143 - 257 | N143 | C257 | KDM4B_HUMAN - c-Myb- | 1.36846084 | 0.01145761 |
| | | | TAD | | |
| 231 - 280 | N231 | C280 | KDM5B_HUMAN - CBF1- | 1.36842317 | 0.0195752 |
| | | | Cterm | | |
| 212 - 317 | N212 | C317 | HDAC8_HUMAN - HDAC3 | 1.3672855 | 0.02391772 |
| 189 - 281 | N189 | C281 | ING2_HUMAN - VP64 | 1.36574136 | 0.0025137 |
| 282 - 152 | N282 | C152 | VP160 - CDY1_HUMAN | 1.36405631 | 0.0022828 |
| 285 - 114 | N285 | C114 | p65-MyoD - | 1.36392555 | 0.04485262 |
| | | | KDM5A_HUMAN | | |
| 88 -200 | N88 | C200 | ING4_HUMAN - | 1.36369069 | 0.01821144 |
| | | | ARP5_HUMAN | | |
| 189 - 284 | N189 | C284 | ING2_HUMAN - p65-HSF1 | 1.36362736 | 0.02166561 |
| 233 - 280 | N233 | C280 | HINFP_HUMAN - CBF1- | 1.3636016 | 0.00812802 |
| | | | Cterm | | |
| 218 - 14 | N218 | C14 | IN80B_HUMAN - RELA | 1.36192882 | 0.04737697 |
| 99 - 264 | N99 | C264 | IN80C_HUMAN - | 1.36145584 | 0.04693328 |
| | | | MTL5_HUMAN | | |
| 120 - 281 | N120 | C281 | RING1_HUMAN - VP64 | 1.36063433 | 0.00313648 |
| 285 - 173 | N285 | C173 | p65-MyoD - SIR4_HUMAN | 1.35742821 | 0.00563096 |
| 311 - 281 | N311 | C281 | Sin3a - VP64 | 1.35714977 | 0.00605773 |
| 220 - 285 | N220 | C285 | JARD2_HUMAN - p65- | 1.35714124 | 5.21E−04 |
| | | | MyoD | | |
| 295 - 1 | N295 | C1 | SET-TAF1B - SETD1A | 1.35675388 | 0.00381267 |
| 35 - 75 | N35 | C75 | VPR_JKNp64 - | 1.35461193 | 0.0282864 |
| | | | KDM5D_HUMAN | | |
| 282 - 91 | N282 | C91 | VP160 - ANM5_HUMAN | 1.35277754 | 0.00871209 |
| 174 - 14 | N174 | C14 | HDAC1_HUMAN - RELA | 1.35254333 | 0.03665257 |
| 204 - 284 | N204 | C284 | HIFIN_HUMAN - p65-HSF1 | 1.35168551 | 0.0297856 |
| 99 - 14 | N99 | C14 | IN80C_HUMAN - RELA | 1.35074263 | 0.00133935 |
| 285 - 311 | N285 | C311 | p65-MyoD - Sin3a | 1.34569137 | 0.00198258 |
| 284 - 287 | N284 | C287 | p65-HSF1 - G9A[SET] | 1.34534782 | 0.00292155 |
| 235 - 284 | N235 | C284 | CARM1_HUMAN - p65- | 1.34458057 | 0.0311949 |
| | | | HSF1 | | |
| 111 - 14 | N111 | C14 | KDM5A_HUMAN - RELA | 1.34347686 | 0.01283457 |
| 281 - 163 | N281 | C163 | VP64 - ANM7_HUMAN | 1.34344502 | 0.04561601 |
| 285 - 274 | N285 | C274 | p65-MyoD - UBE2A | 1.34156977 | 0.01985893 |
| 42 - 285 | N42 | C285 | KMT2E_HUMAN - p65- | 1.34089592 | 0.00682479 |
| | | | MyoD | | |
| 273 - 285 | N273 | C285 | PRDM9-CD - p65-MyoD | 1.34082318 | 0.00195313 |
| 35 - 307 | N35 | C307 | VPR_JKNp64 - KYP | 1.34061311 | 0.01442868 |
| 281 - 131 | N281 | C131 | VP64 - PRDM2_HUMAN | 1.33880279 | 0.04839608 |
| 14- 216 | N14 | C216 | RELA - ING5_HUMAN | 1.33855532 | 0.01280726 |
| 284 - 220 | N284 | C220 | p65-HSF1 - JARD2_HUMAN | 1.33838326 | 0.01030078 |
| 134 - 14 | N134 | C14 | KDM2A_HUMAN - RELA | 1.33761352 | 0.03706062 |
| 253 - 280 | N253 | C280 | RBBP5_HUMAN - CBF1- | 1.3351087 | 0.02102931 |
| | | | Cterm | | |
| 252 - 313 | N252 | C313 | HCFC1_HUMAN - SaII | 1.33484703 | 0.04896993 |
| 257 - 250 | N257 | C250 | c-Myb-TAD - | 1.33421431 | 0.00131015 |
| | | | HCFC1_HUMAN | | |
| 218 - 17 | N218 | C17 | IN80B_HUMAN - EZH2 | 1.33399396 | 0.00945789 |
| 42 - 14 | N42 | C14 | KMT2E_HUMAN - RELA | 1.33350405 | 0.0287274 |
| 10 - 218 | N10 | C218 | HSF1 - IN80B_HUMAN | 1.33333729 | 0.0448695 |
| 63 - 250 | N63 | C250 | SMYD5_HUMAN - | 1.33217239 | 0.00771666 |
| | | | HCFC1_HUMAN | | |
| 285 - 273 | N285 | C273 | p65-MyoD - PRDM9-CD | 1.33144881 | 0.00367688 |
| 267 - 257 | N267 | C257 | FOXA1-Nterm - c-Myb-TAD | 1.33120191 | 0.04485757 |
| 197 - 135 | N197 | C135 | SUV91_HUMAN - | 1.32917393 | 0.04680826 |
| | | | KDM2A_HUMAN | | |
| 246 - 285 | N246 | C285 | ATRX_HUMAN - p65-MyoD | 1.32861373 | 8.50E−04 |
| 71 - 35 | N71 | C35 | RUVB1_HUMAN - | 1.32859677 | 0.03312713 |
| | | | VPR_JKNp64 | | |
| 14 - 47 | N14 | C47 | RELA - ANM2_HUMAN | 1.32812364 | 0.01351396 |
| 35 - 194 | N35 | C194 | VPR_JKNp64 - | 1.32785877 | 0.01532409 |
| | | | ING1_HUMAN | | |
| 218 - 328 | N218 | C328 | IN80B_HUMAN - hs_PHF19 | 1.32657605 | 0.04507431 |
| 35 - 152 | N35 | C152 | VPR_JKNp64 - | 1.32516777 | 0.04517351 |
| | | | CDY1_HUMAN | | |
| 197 - 14 | N197 | C14 | SUV91_HUMAN - RELA | 1.3251165 | 0.01493781 |
| 200 - 87 | N200 | C87 | ARP5_HUMAN - | 1.32447818 | 0.03311752 |
| | | | SETD7_HUMAN | | |
| 14 - 324 | N14 | C324 | RELA - LBR_HUMAN | 1.32341807 | 8.86E−04 |
| 35 - 76 | N35 | C76 | VPR_JKNp64 - | 1.32321989 | 0.00699858 |
| | | | KDM5D_HUMAN | | |
| 348 - 204 | N348 | C204 | BRDT_HUMAN - | 1.32297897 | 0.01718 |
| | | | HIFIN_HUMAN | | |
| 284 - 118 | N284 | C118 | p65-HSF1 - | 1.3222233 | 0.0393834 |
| | | | HDAC6_HUMAN | | |
| 281 - 41 | N281 | C41 | VP64 - SMCA5_HUMAN | 1.32009467 | 0.02906756 |
| 217 - 1 | N217 | C1 | CHRC1_HUMAN - SETD1A | 1.31798982 | 0.01486025 |
| 200 - 69 | N200 | C69 | ARP5_HUMAN - | 1.31783112 | 0.02366878 |
| | | | SETB2_HUMAN | | |
| 111 - 285 | N111 | C285 | KDM5A_HUMAN - p65- | 1.31750008 | 0.0468475 |
| | | | MyoD | | |
| 51 - 35 | N51 | C35 | UCHL5_HUMAN - | 1.31642291 | 0.01577542 |
| | | | VPR_JKNp64 | | |
| 285 - 106 | N285 | C106 | p65-MyoD - | 1.31521237 | 0.00469907 |
| | | | KAT6B_HUMAN | | |
| 151 - 15 | N151 | C15 | SIR7_HUMAN - EP300 | 1.3151133 | 0.02524305 |
| 106 - 257 | N106 | C257 | KAT6B_HUMAN - c-Myb- | 1.31487801 | 0.00530516 |
| | | | TAD | | |
| 246 - 14 | N246 | C14 | ATRX_HUMAN - RELA | 1.31486324 | 0.00455976 |
| 233 - 10 | N233 | C10 | HINFP_HUMAN - HSF1 | 1.31470417 | 0.01675853 |
| 118 - 14 | N118 | C14 | HDAC6_HUMAN - RELA | 1.31054309 | 8.86E−04 |
| 28 - 257 | N28 | C257 | EHMT2 - c-Myb-TAD | 1.30999861 | 0.00794745 |
| 332 - 257 | N332 | C257 | hs_SIRT5 - c-Myb-TAD | 1.30996794 | 0.00785043 |
| 174 - 285 | N174 | C285 | HDAC1_HUMAN - p65- | 1.30830943 | 0.00733429 |
| | | | MyoD | | |
| 246 - 10 | N246 | C10 | ATRX_HUMAN - HSF1 | 1.30736949 | 0.02905818 |
| 98 - 249 | N98 | C249 | A4FU79_HUMAN - HAC1- | 1.30715087 | 0.03504789 |
| | | | HAT | | |
| 136 - 257 | N136 | C257 | JMJD6_HUMAN - c-Myb- | 1.30628371 | 0.00237972 |
| | | | TAD | | |
| 284 - 339 | N284 | C339 | p65-HSF1 - SPOC1_HUMAN | 1.30620557 | 0.02786141 |
| 271 - 87 | N271 | C87 | GCN5 - SETD7_HUMAN | 1.30571613 | 0.04629136 |
| 281 - 108 | N281 | C108 | VP64 - KAT6B_HUMAN | 1.30527161 | 0.02776681 |
| 136 - 14 | N136 | C14 | JMJD6_HUMAN - RELA | 1.30447635 | 0.00655957 |
| 118 - 10 | N118 | C10 | HDAC6_HUMAN - HSF1 | 1.30298197 | 0.02534365 |
| 127 - 281 | N127 | C281 | SETMR_HUMAN - VP64 | 1.30087027 | 0.02166445 |
| 35 - 280 | N35 | C280 | VPR_JKNp64 - CBF1-Cterm | 1.299785 | 0.00881533 |
| 282 - 41 | N282 | C41 | VP160 - SMCA5_HUMAN | 1.29972568 | 0.01206102 |
| 33 - 327 | N33 | C327 | Hilton_2015 - hs_NIPP1 | 1.29963449 | 0.00621345 |
| 284 - 34 | N284 | C34 | p65-HSF1 - DNMT3A- | 1.29943636 | 0.00105472 |
| | | | 3L_JKNp112 | | |
| 204 - 35 | N204 | C35 | HIFIN_HUMAN - | 1.29904482 | 0.03238975 |
| | | | VPR_JKNp64 | | |
| 73 - 10 | N73 | C10 | KDM5D_HUMAN - HSF1 | 1.29773752 | 0.00252424 |
| 14 - 34 | N14 | C34 | RELA - DNMT3A- | 1.29678105 | 4.16E−04 |
| | | | 3L_JKNp112 | | |
| 285 - 336 | N285 | C336 | p65-MyoD - ce_Set4 | 1.29654094 | 0.01762316 |
| 296 - 54 | N296 | C54 | HP1a - CBP_HUMAN | 1.29528981 | 0.00763034 |
| 282 - 51 | N282 | C51 | VP160 - UCHL5_HUMAN | 1.2947998 | 0.00114236 |
| 61 - 284 | N61 | C284 | HAT1_HUMAN - p65-HSF1 | 1.29425781 | 0.02774423 |
| 148 - 284 | N148 | C284 | NSD3_HUMAN - p65-HSF1 | 1.29396738 | 0.01457633 |
| 150 - 99 | N150 | C99 | HDA11_HUMAN - | 1.2933064 | 0.00226719 |
| | | | IN80C_HUMAN | | |
| 67 - 281 | N67 | C281 | PRDM9_HUMAN - VP64 | 1.29260042 | 7.91E−04 |
| 282 - 96 | N282 | C96 | VP160 - CHD3_HUMAN | 1.29193963 | 0.04359672 |
| 15 - 240 | N15 | C240 | EP300 - ANM3_HUMAN | 1.29113884 | 0.02557326 |
| 20 - 35 | N20 | C35 | KDM1B - VPR_JKNp64 | 1.29093048 | 0.00905715 |
| 118 - 15 | N118 | C15 | HDAC6_HUMAN - EP300 | 1.29080922 | 0.00848423 |
| 285 - 85 | N285 | C85 | p65-MyoD - | 1.28921612 | 0.01653297 |
| | | | SMYD3_HUMAN | | |
| 284 - 126 | N284 | C126 | p65-HSF1 - | 1.28882589 | 0.00386316 |
| | | | SETMR_HUMAN | | |
| 149 - 14 | N149 | C14 | MBD1_HUMAN - RELA | 1.28741891 | 0.00103181 |
| 14 - 210 | N14 | C210 | RELA - SIR3_HUMAN | 1.28653601 | 0.03904283 |
| 284 - 329 | N284 | C329 | p65-HSF1 - pbcv1_vSET | 1.28588539 | 0.02816396 |
| 97 - 305 | N97 | C305 | CHD3_HUMAN - NUE | 1.28580367 | 0.04570827 |
| 59 - 99 | N59 | C99 | INO80_HUMAN - | 1.28569053 | 0.00300938 |
| | | | IN80C_HUMAN | | |
| 222 - 173 | N222 | C173 | IN80E_HUMAN - | 1.28498426 | 0.02496508 |
| | | | SIR4_HUMAN | | |
| 281 - 333 | N281 | C333 | VP64 - sc_RPD3 | 1.28454344 | 0.01491404 |
| 141 - 284 | N141 | C284 | SMRC1_HUMAN - p65- | 1.28430122 | 0.02370791 |
| | | | HSF1 | | |
| 107 - 281 | N107 | C281 | KAT6B_HUMAN - VP64 | 1.27988453 | 0.00269248 |
| 285 - 120 | N285 | C120 | p65-MyoD - | 1.27828564 | 0.0125886 |
| | | | RING1_HUMAN | | |
| 14 - 38 | N14 | C38 | RELA - EHMT2 | 1.27820268 | 0.0180353 |
| 285 - 75 | N285 | C75 | p65-MyoD - | 1.27809448 | 0.00120087 |
| | | | KDM5D_HUMAN | | |
| 281 - 103 | N281 | C103 | VP64 - B4DKA4_HUMAN | 1.27796152 | 0.01586955 |
| 14 - 154 | N14 | C154 | RELA - NSD2_HUMAN | 1.27791369 | 0.04588529 |
| 222 - 257 | N222 | C257 | IN80E_HUMAN - c-Myb- | 1.27785729 | 0.00704491 |
| | | | TAD | | |
| 284 - 90 | N284 | C90 | p65-HSF1 - CHD4_HUMAN | 1.277606 | 0.00275486 |
| 88 - 257 | N88 | C257 | ING4_HUMAN - c-Myb- | 1.27743141 | 0.01608693 |
| | | | TAD | | |
| 282 - 243 | N282 | C243 | VP160 - DNMT1_HUMAN | 1.277358 | 0.01057679 |
| 74 - 99 | N74 | C99 | KDM5D_HUMAN - | 1.27599983 | 0.01765566 |
| | | | IN80C_HUMAN | | |
| 281 - 273 | N281 | C273 | VP64 - PRDM9-CD | 1.27555364 | 0.00160741 |
| 154 - 296 | N154 | C296 | NSD2_HUMAN - HP1a | 1.27525309 | 0.04698377 |
| 48 - 284 | N48 | C284 | SETD5_HUMAN - p65-HSF1 | 1.27294037 | 0.03728062 |
| 313 - 14 | N313 | C14 | SaII - RELA | 1.27276221 | 0.04766708 |
| 297 - 257 | N297 | C257 | MesoLo - c-Myb-TAD | 1.27232189 | 0.00202764 |
| 212 - 245 | N212 | C245 | HDAC8_HUMAN - | 1.27144282 | 0.02697181 |
| | | | TYY1_HUMAN | | |
| 24 - 284 | N24 | C284 | CTCFL - p65-HSF1 | 1.26847633 | 0.03835803 |
| 14 - 297 | N14 | C297 | RELA - MesoLo | 1.26843928 | 0.00256499 |
| 255 - 99 | N255 | C99 | EED_HUMAN - | 1.26751318 | 0.01812762 |
| | | | IN80C_HUMAN | | |
| 300 - 252 | N300 | C252 | SIRT6 - HCFC1_HUMAN | 1.26443344 | 0.00818746 |
| 285 - 270 | N285 | C270 | p65-MyoD - ENL | 1.26189925 | 0.02072998 |
| 285 - 302 | N285 | C302 | p65-MyoD - HDAC11 | 1.2617895 | 0.00468276 |
| 218 - 257 | N218 | C257 | IN80B_HUMAN - c-Myb- | 1.26136866 | 0.00543591 |
| | | | TAD | | |
| 14 - 101 | N14 | C101 | RELA - TAF1_HUMAN | 1.26079684 | 0.04633285 |
| 281 - 311 | N281 | C311 | VP64 - Sin3a | 1.26042564 | 0.00101697 |
| 162 - 257 | N162 | C257 | SIR6_HUMAN - c-Myb-TAD | 1.25959501 | 0.00890762 |
| 299 - 14 | N299 | C14 | HST2 - RELA | 1.25721055 | 0.00428442 |
| 162 - 14 | N162 | C14 | SIR6_HUMAN - RELA | 1.25603575 | 0.04226079 |
| 308 - 14 | N308 | C14 | HDT1 - RELA | 1.25538493 | 0.00105626 |
| 173 - 252 | N173 | C252 | SIR4_HUMAN - | 1.25538486 | 0.02641928 |
| | | | HCFC1_HUMAN | | |
| 285 - 262 | N285 | C262 | p65-MyoD - EZH2 | 1.25509465 | 0.04272417 |
| 285 - 48 | N285 | C48 | p65-MyoD - | 1.25503052 | 0.00140344 |
| | | | SETD5_HUMAN | | |
| 275 - 10 | N275 | C10 | DOT1L-DOT1_domain - | 1.25454207 | 0.04547223 |
| | | | HSF1 | | |
| 14 - 218 | N14 | C218 | RELA - IN80B_HUMAN | 1.25381147 | 0.00590569 |
| 250 - 267 | N250 | C267 | HCFC1_HUMAN - FOXA1- | 1.25229756 | 0.02892508 |
| | | | Nterm | | |
| 252 - 1 | N252 | C1 | HCFC1_HUMAN - SETD1A | 1.25164779 | 0.00676375 |
| 69 - 114 | N69 | C114 | SETB2_HUMAN - | 1.25157027 | 0.00999102 |
| | | | KDM5A_HUMAN | | |
| 281 - 107 | N281 | C107 | VP64 - KAT6B_HUMAN | 1.25093404 | 0.00931099 |
| 14 - 59 | N14 | C59 | RELA - INO80_HUMAN | 1.25077395 | 0.00115173 |
| 210 - 281 | N210 | C281 | SIR3_HUMAN - VP64 | 1.24906588 | 0.02576719 |
| 331 - 281 | N331 | C281 | mm_G9a - VP64 | 1.24851424 | 0.00150538 |
| 173 - 17 | N173 | C17 | SIR4_HUMAN - EZH2 | 1.24700213 | 0.01458457 |
| 205 - 257 | N205 | C257 | JMJD7_HUMAN - c-Myb- | 1.24563043 | 0.0056145 |
| | | | TAD | | |
| 14 - 306 | N14 | C306 | RELA - CobB | 1.24542427 | 0.00234543 |
| 73 - 291 | N73 | C291 | KDM5D_HUMAN - SS18 | 1.24443468 | 0.00461808 |
| 162 - 345 | N162 | C345 | SIR6_HUMAN - | 1.24440333 | 0.03531449 |
| | | | MSX2_HUMAN | | |
| 270 - 187 | N270 | C187 | ENL - MBD4_HUMAN | 1.24304035 | 0.01629168 |
| 27 - 284 | N27 | C284 | EZH1 - p65-HSF1 | 1.24202732 | 0.02343438 |
| 199 - 133 | N199 | C133 | ING3_HUMAN - | 1.24142431 | 0.02001021 |
| | | | KAT8_HUMAN | | |
| 305 - 281 | N305 | C281 | NUE - VP64 | 1.24139616 | 0.04333359 |
| 285 - 12 | N285 | C12 | p65-MyoD - KMT2A | 1.23994609 | 0.01232446 |
| 14 - 27 | N14 | C27 | RELA - EZH1 | 1.23864752 | 0.00361728 |
| 123 - 12 | N123 | C12 | KMT2A_HUMAN - KMT2A | 1.23823007 | 0.04705236 |
| 322 - 257 | N322 | C257 | MINT_HUMAN - c-Myb- | 1.23749328 | 0.01303805 |
| | | | TAD | | |
| 14 - 346 | N14 | C346 | RELA - MSX2_HUMAN | 1.23741423 | 0.01797255 |
| 284 - 111 | N284 | C111 | p65-HSF1 - | 1.23721114 | 0.00185564 |
| | | | KDM5A_HUMAN | | |
| 252 - 98 | N252 | C98 | HCFC1_HUMAN - | 1.23638298 | 0.04060605 |
| | | | A4FU79_HUMAN | | |
| 285 - 212 | N285 | C212 | p65-MyoD - | 1.23547827 | 0.01181548 |
| | | | HDAC8_HUMAN | | |
| 200 - 294 | N200 | C294 | ARP5_HUMAN - DIM5 | 1.23441894 | 0.01469099 |
| 285 - 338 | N285 | C338 | p65-MyoD - | 1.23070662 | 0.03569942 |
| | | | RBM15_HUMAN | | |
| 281 - 76 | N281 | C76 | VP64 - KDM5D_HUMAN | 1.23057128 | 0.02024573 |
| 118 - 8 | N118 | C8 | HDAC6_HUMAN - MECP2 | 1.22884746 | 0.02147749 |
| 345 - 118 | N345 | C118 | MSX2_HUMAN | 1.22794318 | 0.04283543 |
| | | | HDAC6_HUMAN | | |
| 73 - 285 | N73 | C285 | KDM5D_HUMAN - p65- | 1.22699008 | 0.00829886 |
| | | | MyoD | | |
| 14 - 37 | N14 | C37 | RELA - KDM6A | 1.22694249 | 0.00233962 |
| 284 - 317 | N284 | C317 | p65-HSF1 - HDAC3 | 1.2261329 | 0.0115686 |
| 312 - 284 | N312 | C284 | SetD8 - p65-HSF1 | 1.22409631 | 0.00230538 |
| 281 - 294 | N281 | C294 | VP64 - DIM5 | 1.22360837 | 0.00168143 |
| 252 - 290 | N252 | C290 | HCFC1_HUMAN - HP1aCS | 1.22300506 | 0.00315879 |
| 17 - 280 | N17 | C280 | EZH2 - CBF1-Cterm | 1.22248939 | 0.01624525 |
| 309 - 281 | N309 | C281 | HDAC8 - VP64 | 1.22075595 | 0.00364504 |
| 339 - 257 | N339 | C257 | SPOC1_HUMAN - c-Myb- | 1.21944739 | 0.01767294 |
| | | | TAD | | |
| 277 - 285 | N277 | C285 | SUV39H1 - p65-MyoD | 1.21908613 | 0.00538528 |
| 220 - 148 | N220 | C148 | JARD2_HUMAN - | 1.21852351 | 0.04485188 |
| | | | NSD3_HUMAN | | |
| 25 - 99 | N25 | C99 | CTCFL - IN80C_HUMAN | 1.21814514 | 0.03793855 |
| 200 - 116 | N200 | C116 | ARP5_HUMAN - | 1.21805121 | 0.03558566 |
| | | | ANM6_HUMAN | | |
| 8 - 284 | N8 | C284 | MECP2 - p65-HSF1 | 1.2178612 | 9.99E−04 |
| 14 - 295 | N14 | C295 | RELA - SET-TAF1B | 1.21782074 | 0.00689414 |
| 118 - 284 | N118 | C284 | HDAC6_HUMAN - p65- | 1.21723985 | 0.02053728 |
| | | | HSF1 | | |
| 324 - 14 | N324 | C14 | LBR_HUMAN - RELA | 1.21708084 | 0.00262102 |
| 285 - 172 | N285 | C172 | p65-MyoD - | 1.21649096 | 0.01412798 |
| | | | ASH1L_HUMAN | | |
| 200 - 313 | N200 | C313 | ARP5_HUMAN - SaII | 1.21355577 | 0.03269682 |
| 1 - 218 | N1 | C218 | SETD1A - IN80B_HUMAN | 1.21287417 | 0.03497552 |
| 285 - 177 | N285 | C177 | p65-MyoD - | 1.2126358 | 0.00702533 |
| | | | KDM5C_HUMAN | | |
| 26 - 138 | N26 | C138 | EZH1 - TFPT_HUMAN | 1.21176152 | 0.03936804 |
| 200 - 214 | N200 | C214 | ARP5_HUMAN - | 1.21080692 | 0.04074797 |
| | | | HDAC4_HUMAN | | |
| 267 - 285 | N267 | C285 | FOXA1-Nterm - p65-MyoD | 1.20729689 | 0.03185364 |
| 10 - 78 | N10 | C78 | HSF1 - KAT6A_HUMAN | 1.20463101 | 0.02364018 |
| 136 - 237 | N136 | C237 | JMJD6_HUMAN - | 1.20353362 | 0.04303552 |
| | | | KAT5_HUMAN | | |
| 294 - 15 | N294 | C15 | DIM5 - EP300 | 1.20314549 | 0.01245629 |
| 315 - 29 | N315 | C29 | NCoR - ASH2L | 1.20195337 | 0.01688794 |
| 75 - 14 | N75 | C14 | KDM5D_HUMAN - RELA | 1.20067552 | 0.03037766 |
| 63 - 285 | N63 | C285 | SMYD5_HUMAN - p65- | 1.20002823 | 0.04483307 |
| | | | MyoD | | |
| 14 - 289 | N14 | C289 | RELA - FOG1 | 1.19905603 | 0.03922023 |
| 1 - 14 | N1 | C14 | SETD1A - RELA | 1.19735734 | 0.00160344 |
| 327 - 285 | N327 | C285 | hs_NIPP1 - p65-MyoD | 1.19719099 | 0.03805002 |
| 103 - 281 | N103 | C281 | B4DKA4_HUMAN - VP64 | 1.19547925 | 0.0270257 |
| 213 - 281 | N213 | C281 | HBAP1_HUMAN - VP64 | 1.19519759 | 0.00271487 |
| 284 - 302 | N284 | C302 | p65-HSF1 - HDAC11 | 1.19455265 | 0.02191715 |
| 129 - 257 | N129 | C257 | HAIR_HUMAN - c-Myb- | 1.19268356 | 0.01692662 |
| | | | TAD | | |
| 14 - 17 | N14 | C17 | RELA - EZH2 | 1.19149308 | 0.00523058 |
| 148 - 280 | N148 | C280 | NSD3_HUMAN - CBF1- | 1.19120475 | 0.02123235 |
| | | | Cterm | | |
| 326 - 15 | N326 | C15 | pf_Sir2A - EP300 | 1.19093602 | 0.04640505 |
| 14 - 326 | N14 | C326 | RELA - pf_Sir2A | 1.18966201 | 0.00707283 |
| 231 - 190 | N231 | C190 | KDM5B_HUMAN - | 1.18935173 | 0.04327003 |
| | | | ANM1_HUMAN | | |
| 135 - 284 | N135 | C284 | KDM2A_HUMAN - p65- | 1.18643895 | 0.04051119 |
| | | | HSF1 | | |
| 280 - 250 | N280 | C250 | CBF1-Cterm - | 1.18643531 | 9.88E−04 |
| | | | HCFC1_HUMAN | | |
| 284 - 48 | N284 | C48 | p65-HSF1 - SETD5_HUMAN | 1.1863083 | 0.00203831 |
| 149 - 250 | N149 | C250 | MBD1_HUMAN - | 1.18630155 | 0.03665783 |
| | | | HCFC1_HUMAN | | |
| 47 - 10 | N47 | C10 | ANM2_HUMAN - HSF1 | 1.18567017 | 0.03303675 |
| 14 - 302 | N14 | C302 | RELA - HDAC11 | 1.18420986 | 0.0171533 |
| 200 - 250 | N200 | C250 | ARP5_HUMAN - | 1.18382014 | 0.04444352 |
| | | | HCFC1_HUMAN | | |
| 138 - 257 | N138 | C257 | TFPT_HUMAN - c-Myb- | 1.1834844 | 0.00569724 |
| | | | TAD | | |
| 66 - 10 | N66 | C10 | DOT1L_HUMAN - HSF1 | 1.18340257 | 0.01764687 |
| 280 - 267 | N280 | C267 | CBF1-Cterm - FOXA1-Nterm | 1.18303592 | 0.04722155 |
| 282 - 98 | N282 | C98 | VP160 - A4FU79_HUMAN | 1.18284676 | 0.00717264 |
| 200 - 233 | N200 | C233 | ARP5_HUMAN - | 1.18279256 | 0.00492612 |
| | | | HINFP_HUMAN | | |
| 14 - 205 | N14 | C205 | RELA - JMJD7_HUMAN | 1.18163765 | 0.00737654 |
| 317 - 284 | N317 | C284 | HDAC3 - p65-HSF1 | 1.18119845 | 0.01266285 |
| 14 - 226 | N14 | C226 | RELA - SETD2_HUMAN | 1.18038903 | 0.03022385 |
| 35 - 329 | N35 | C329 | VPR_JKNp64 - pbcv1_vSET | 1.17930846 | 0.04943535 |
| 138 - 252 | N138 | C252 | TFPT_HUMAN - | 1.17897562 | 0.01635413 |
| | | | HCFC1_HUMAN | | |
| 14 - 309 | N14 | C309 | RELA - HDAC8 | 1.17605585 | 0.01230685 |
| 173 - 257 | N173 | C257 | SIR4_HUMAN - c-Myb-TAD | 1.17586959 | 0.01285672 |
| 300 - 257 | N300 | C257 | SIRT6 - c-Myb-TAD | 1.17498871 | 0.00415894 |
| 12 - 252 | N12 | C252 | KMT2A - HCFC1_HUMAN | 1.17466407 | 0.03012158 |
| 329 - 285 | N329 | C285 | pbcv1_vSET - p65-MyoD | 1.17344779 | 0.01077113 |
| 282 - 100 | N282 | C100 | VP160 - TAF1_HUMAN | 1.17085754 | 0.00658288 |
| 14 - 271 | N14 | C271 | RELA - GCN5 | 1.17084937 | 0.00225809 |
| 17 - 310 | N17 | C310 | EZH2 - TgSET8 | 1.17076872 | 0.0329971 |
| 197 - 257 | N197 | C257 | SUV91_HUMAN - c-Myb- | 1.16738757 | 0.00211464 |
| | | | TAD | | |
| 250 - 246 | N250 | C246 | HCFC1_HUMAN - | 1.16724347 | 0.04056063 |
| | | | ATRX_HUMAN | | |
| 250 - 233 | N250 | C233 | HCFC1_HUMAN - | 1.16605358 | 0.00447943 |
| | | | HINFP_HUMAN | | |
| 252 - 239 | N252 | C239 | HCFC1_HUMAN - | 1.16551227 | 0.02433917 |
| | | | KDM8_HUMAN | | |
| 282 - 30 | N282 | C30 | VP160 - KDM3A | 1.16408259 | 0.01795862 |
| 35 - 32 | N35 | C32 | VPR_JKNp64 - | 1.16364503 | 0.01461138 |
| | | | Gilbert_Lab_CRISPRi_KRAB | | |
| 327 - 291 | N327 | C291 | hs_NIPP1 - SS18 | 1.16077983 | 0.03312439 |
| 166 - 257 | N166 | C257 | EHMT1_HUMAN - c-Myb- | 1.16073488 | 0.0251635 |
| | | | TAD | | |
| 255 -20 | N255 | C20 | EED_HUMAN - KDM1B | 1.16067055 | 0.02860744 |
| 87 - 257 | N87 | C257 | SETD7_HUMAN - c-Myb- | 1.16036174 | 0.00733947 |
| | | | TAD | | |
| 79 - 285 | N79 | C285 | KAT6A_HUMAN - p65- | 1.15980803 | 0.02098242 |
| | | | MyoD | | |
| 284 - 53 | N284 | C53 | p65-HSF1 - CBP_HUMAN | 1.15934091 | 0.01725859 |
| 250 - 327 | N250 | C327 | HCFC1_HUMAN - hs_NIPP1 | 1.15807599 | 0.02685557 |
| 59 - 102 | N59 | C102 | INO80_HUMAN - | 1.15310073 | 0.03471362 |
| | | | TAF1_HUMAN | | |
| 112 - 10 | N112 | C10 | KDM5A_HUMAN - HSF1 | 1.15260331 | 0.03319136 |
| 257 - 99 | N257 | C99 | c-Myb-TAD - | 1.15022566 | 0.01712779 |
| | | | IN80C_HUMAN | | |
| 59 - 285 | N59 | C285 | INO80_HUMAN - p65-MyoD | 1.14963845 | 0.02255725 |
| 285 - 309 | N285 | C309 | p65-MyoD - HDAC8 | 1.14909558 | 0.04356006 |
| 281 - 241 | N281 | C241 | VP64 - SIR2_HUMAN | 1.14904638 | 0.00394925 |
| 14 - 9 | N14 | C9 | RELA - MECP2 | 1.14901459 | 0.04223749 |
| 14 - 69 | N14 | C69 | RELA - SETB2_HUMAN | 1.14761442 | 0.00733734 |
| 280 - 99 | N280 | C99 | CBF1-Cterm - | 1.14715006 | 0.00632289 |
| | | | IN80C_HUMAN | | |
| 200 - 266 | N200 | C266 | ARP5_HUMAN - GADD45A | 1.14702003 | 0.03718701 |
| 284 - 348 | N284 | C348 | p65-HSF1 - BRDT_HUMAN | 1.146704 | 0.03575883 |
| 14 - 136 | N14 | C136 | RELA - JMJD6_HUMAN | 1.14663395 | 0.02792436 |
| 14 - 20 | N14 | C20 | RELA - KDM1B | 1.14565466 | 0.02093099 |
| 25 - 119 | N25 | C119 | CTCFL - ACL6A_HUMAN | 1.1452643 | 0.01691316 |
| 73 - 218 | N73 | C218 | KDM5D_HUMAN - | 1.14426942 | 0.02501967 |
| | | | IN80B_HUMAN | | |
| 14 - 77 | N14 | C77 | RELA - KDM5D_HUMAN | 1.14363619 | 0.02664823 |
| 15 - 1 | N15 | C1 | EP300 - SETD1A | 1.14191575 | 0.00393777 |
| 282 - 273 | N282 | C273 | VP160 - PRDM9-CD | 1.14176406 | 0.00707942 |
| 282 - 187 | N282 | C187 | VP160 - MBD4_HUMAN | 1.14118589 | 0.00215247 |
| 327 - 280 | N327 | C280 | hs_NIPP1 - CBF1-Cterm | 1.1408709 | 0.00443957 |
| 32 - 14 | N32 | C14 | Gilbert_Lab_CRISPRi_KRAB - | 1.13962232 | 0.00860258 |
| | | | RELA | | |
| 14 - 312 | N14 | C312 | RELA - SetD8 | 1.13961277 | 0.00491463 |
| 14 - 268 | N14 | C268 | RELA - FOXA1-Cterm | 1.13938881 | 0.01184859 |
| 285 - 301 | N285 | C301 | p65-MyoD - SIRT3 | 1.13891315 | 0.01597431 |
| 322 - 266 | N322 | C266 | MINT_HUMAN - GADD45A | 1.13880772 | 0.03924703 |
| 83 - 111 | N83 | C111 | SMRD3_HUMAN - | 1.1383584 | 0.01757555 |
| | | | KDM5A_HUMAN | | |
| 33 - 315 | N33 | C315 | Hilton_2015 - NCoR | 1.1383347 | 0.00721579 |
| 14 - 90 | N14 | C90 | RELA - CHD4_HUMAN | 1.13809204 | 0.02966496 |
| 14 - 73 | N14 | C73 | RELA - KDM5D_HUMAN | 1.13658617 | 0.01179978 |
| 150 - 14 | N150 | C14 | HDA11_HUMAN - RELA | 1.13511203 | 0.01212077 |
| 14 - 112 | N14 | C112 | RELA - KDM5A_HUMAN | 1.13486584 | 0.01647148 |
| 38 - 14 | N38 | C14 | EHMT2 - RELA | 1.13433608 | 0.00654559 |
| 268 -266 | N268 | C266 | FOXA1-Cterm - GADD45A | 1.13368964 | 0.03510333 |
| 293 - 281 | N293 | C281 | KRAB-MeCP2 - VP64 | 1.13333888 | 0.01658656 |
| 319 - 314 | N319 | C314 | mCBP-HAT - MeCP2 | 1.13214042 | 0.04755309 |
| 281 - 288 | N281 | C288 | VP64 - SUV[SET] | 1.13206951 | 0.0105383 |
| 310 - 14 | N310 | C14 | TgSET8 - RELA | 1.13205687 | 0.01446142 |
| 281 - 51 | N281 | C51 | VP64 - UCHL5_HUMAN | 1.13155493 | 0.01155956 |
| 285 - 59 | N285 | C59 | p65-MyoD - INO80_HUMAN | 1.13151285 | 0.00661797 |
| 14 - 88 | N14 | C88 | RELA - ING4_HUMAN | 1.13064324 | 0.00223551 |
| 315 - 10 | N315 | C10 | NCoR - HSF1 | 1.12986904 | 0.02617633 |
| 285 - 90 | N285 | C90 | p65-MyoD - CHD4_HUMAN | 1.1297965 | 0.00866607 |
| 241 - 14 | N241 | C14 | SIR2_HUMAN - RELA | 1.12948219 | 0.02256749 |
| 281 - 222 | N281 | C222 | VP64 - IN80E_HUMAN | 1.12893299 | 0.02391655 |
| 266 - 14 | N266 | C14 | GADD45A - RELA | 1.12717093 | 0.00507326 |
| 48 - 10 | N48 | C10 | SETD5_HUMAN - HSF1 | 1.12575539 | 0.02621402 |
| 281 - 243 | N281 | C243 | VP64 - DNMT1_HUMAN | 1.12530222 | 0.03213164 |
| 266 - 284 | N266 | C284 | GADD45A - p65-HSF1 | 1.12450186 | 0.01985237 |
| 252 - 267 | N252 | C267 | HCFC1_HUMAN - FOXA1- | 1.12447912 | 0.0497102 |
| | | | Nterm | | |
| 35 - 98 | N35 | C98 | VPR_JKNp64 - | 1.12421824 | 0.02376499 |
| | | | A4FU79_HUMAN | | |
| 219 - 257 | N219 | C257 | JARD2_HUMAN - c-Myb- | 1.11994248 | 0.04222132 |
| | | | TAD | | |
| 306 - 14 | N306 | C14 | CobB - RELA | 1.1192136 | 0.01079551 |
| 285 - 191 | N285 | C191 | p65-MyoD - CDYL_HUMAN | 1.11864951 | 0.03803893 |
| 189 - 291 | N189 | C291 | ING2_HUMAN - SS18 | 1.11729471 | 0.02556547 |
| 14 - 87 | N14 | C87 | RELA - SETD7_HUMAN | 1.11726953 | 0.0269548 |
| 14 - 18 | N14 | C18 | RELA - EZH2 | 1.11642954 | 0.00564617 |
| 281 - 215 | N281 | C215 | VP64 - HDAC4_HUMAN | 1.11613755 | 0.005461 |
| 346 - 10 | N346 | C10 | MSX2_HUMAN - HSF1 | 1.11558973 | 0.0039591 |
| 78 -218 | N78 | C218 | KAT6A_HUMAN - | 1.11296987 | 0.04854407 |
| | | | IN80B_HUMAN | | |
| 35 - 69 | N35 | C69 | VPR_JKNp64 - | 1.11277135 | 0.0128902 |
| | | | SETB2_HUMAN | | |
| 274 - 285 | N274 | C285 | UBE2A - p65-MyoD | 1.1108325 | 0.02199268 |
| 14 - 24 | N14 | C24 | RELA - CTCFL | 1.10991226 | 0.00515855 |
| 14 - 219 | N14 | C219 | RELA - JARD2_HUMAN | 1.10939798 | 0.00338032 |
| 270 - 106 | N270 | C106 | ENL - KAT6B_HUMAN | 1.10937097 | 0.02433989 |
| 26 - 285 | N26 | C285 | EZH1 - p65-MyoD | 1.10788874 | 0.01819086 |
| 136 - 266 | N136 | C266 | JMJD6_HUMAN - | 1.10573172 | 0.01460198 |
| | | | GADD45A | | |
| 287 - 257 | N287 | C257 | G9A[SET] - c-Myb-TAD | 1.10263155 | 0.01003452 |
| 281 - 152 | N281 | C152 | VP64 - CDY1_HUMAN | 1.10246536 | 0.01500151 |
| 296 - 14 | N296 | C14 | HP1a - RELA | 1.09872393 | 0.00352055 |
| 112 - 14 | N112 | C14 | KDM5A_HUMAN - RELA | 1.09858358 | 0.03660809 |
| 14 - 177 | N14 | C177 | RELA - KDM5C_HUMAN | 1.09787204 | 0.03781477 |
| 1 - 10 | N1 | C10 | SETD1A - HSF1 | 1.09654 | 0.01846073 |
| 24 - 328 | N24 | C328 | CTCFL - hs_PHF19 | 1.09227553 | 0.01598669 |
| 34 - 249 | N34 | C249 | DNMT3A-3L_JKNp112 - | 1.09203444 | 0.04315488 |
| | | | HAC1-HAT | | |
| 14 - 287 | N14 | C287 | RELA - G9A[SET] | 1.08942129 | 0.0125785 |
| 111 - 99 | N111 | C99 | KDM5A_HUMAN - | 1.08878362 | 0.01662696 |
| | | | IN80C_HUMAN | | |
| 239 - 257 | N239 | C257 | KDM8_HUMAN - c-Myb- | 1.0851327 | 0.00503321 |
| | | | TAD | | |
| 2 - 257 | N2 | C257 | SETD1A - c-Myb-TAD | 1.08337102 | 0.00809951 |
| 250 - 269 | N250 | C269 | HCFC1_HUMAN - PU.1 | 1.08292585 | 0.00565562 |
| 285 - 264 | N285 | C264 | p65-MyoD - MTL5_HUMAN | 1.08178566 | 0.00966733 |
| 14 - 107 | N14 | C107 | RELA - KAT6B_HUMAN | 1.07953117 | 0.02529427 |
| 295 - 218 | N295 | C218 | SET-TAF1B - | 1.07837581 | 0.03229402 |
| | | | IN80B_HUMAN | | |
| 148 - 257 | N148 | C257 | NSD3_HUMAN - c-Myb- | 1.07654246 | 0.00566102 |
| | | | TAD | | |
| 155 - 281 | N155 | C281 | NSD2_HUMAN - VP64 | 1.07349354 | 0.0122466 |
| 10 - 290 | N10 | C290 | HSF1 - HP1aCS | 1.0734928 | 0.01621253 |
| 284 - 298 | N284 | C298 | p65-HSF1 - MBD2b | 1.07326315 | 0.00680382 |
| 138 - 269 | N138 | C269 | TFPT_HUMAN - PU.1 | 1.07267711 | 0.02235393 |
| 328 - 267 | N328 | C267 | hs_PHF19 - FOXA1-Nterm | 1.07264166 | 0.04978377 |
| 200 - 346 | N200 | C346 | ARP5_HUMAN - | 1.07193488 | 0.01089144 |
| | | | MSX2_HUMAN | | |
| 315 - 284 | N315 | C284 | NCoR - p65-HSF1 | 1.06974047 | 0.03516013 |
| 77 - 290 | N77 | C290 | KDM5D_HUMAN - HP1aCS | 1.0695219 | 0.01453364 |
| 270 - 69 | N270 | C69 | ENL - SETB2_HUMAN | 1.06907556 | 0.02698443 |
| 263 - 285 | N263 | C285 | HDAC8 - p65-MyoD | 1.06605014 | 0.03966031 |
| 6 - 280 | N6 | C280 | KDM1A - CBF1-Cterm | 1.06512222 | 0.01826827 |
| 18 - 99 | N18 | C99 | EZH2 - IN80C_HUMAN | 1.06501131 | 0.01003563 |
| 14 - 48 | N14 | C48 | RELA - SETD5_HUMAN | 1.06501078 | 0.00558666 |
| 130 - 99 | N130 | C99 | PRDM2_HUMAN - | 1.06358797 | 0.016521 |
| | | | IN80C_HUMAN | | |
| 253 - 246 | N253 | C246 | RBBP5_HUMAN - | 1.05820379 | 0.02247181 |
| | | | ATRX_HUMAN | | |
| 78 - 162 | N78 | C162 | KAT6A_HUMAN - | 1.05812536 | 0.0408961 |
| | | | SIR6_HUMAN | | |
| 212 - 269 | N212 | C269 | HDAC8_HUMAN - PU.1 | 1.05767437 | 0.01101144 |
| 14 - 263 | N14 | C263 | RELA - HDAC8 | 1.05600064 | 0.03581272 |
| 324 - 281 | N324 | C281 | LBR_HUMAN - VP64 | 1.05282922 | 0.03366386 |
| 14 - 264 | N14 | C264 | RELA - MTL5_HUMAN | 1.05262503 | 0.0131832 |
| 190 - 269 | N190 | C269 | ANM1_HUMAN - PU.1 | 1.05130914 | 0.04947621 |
| 166 - 99 | N166 | C99 | EHMT1_HUMAN - | 1.05122615 | 0.04300957 |
| | | | IN80C_HUMAN | | |
| 17 - 10 | N17 | C10 | EZH2 - HSF1 | 1.04953351 | 0.01880229 |
| 188 - 257 | N188 | C257 | SMYD4_HUMAN - c-Myb- | 1.04934261 | 0.02085587 |
| | | | TAD | | |
| 26 - 99 | N26 | C99 | EZH1 - IN80C_HUMAN | 1.04841583 | 0.03770376 |
| 200 - 320 | N200 | C320 | ARP5_HUMAN - mMLL3- | 1.04795271 | 0.03265444 |
| | | | SET | | |
| 293 - 285 | N293 | C285 | KRAB-MeCP2 - p65-MyoD | 1.04662582 | 0.04520191 |
| 14 - 222 | N14 | C222 | RELA - IN80E_HUMAN | 1.04615471 | 0.01319151 |
| 218 - 288 | N218 | C288 | IN80B_HUMAN - SUV[SET] | 1.04387908 | 0.01403782 |
| 218 - 233 | N218 | C233 | IN80B_HUMAN - | 1.04387026 | 0.04937932 |
| | | | HINFP_HUMAN | | |
| 274 - 99 | N274 | C99 | UBE2A - IN80C_HUMAN | 1.04110336 | 0.02160648 |
| 38 - 250 | N38 | C250 | EHMT2 - HCFC1_HUMAN | 1.04092092 | 0.04387085 |
| 322 - 14 | N322 | C14 | MINT_HUMAN - RELA | 1.03976038 | 0.04986186 |
| 212 - 15 | N212 | C15 | HDAC8_HUMAN - EP300 | 1.03646773 | 0.02729509 |
| 149 - 99 | N149 | C99 | MBD1_HUMAN - | 1.03615769 | 0.00878247 |
| | | | IN80C_HUMAN | | |
| 78 - 288 | N78 | C288 | KAT6A_HUMAN - | 1.0360823 | 0.04889088 |
| | | | SUV[SET] | | |
| 28 - 290 | N28 | C290 | EHMT2 - HP1aCS | 1.03482047 | 0.0456725 |
| 218 - 99 | N218 | C99 | IN80B_HUMAN - | 1.03360118 | 0.02600464 |
| | | | IN80C_HUMAN | | |
| 100 - 285 | N100 | C285 | TAF1_HUMAN - p65-MyoD | 1.03334644 | 0.01742126 |
| 15 - 313 | N15 | C313 | EP300 - SaII | 1.03232303 | 0.02082581 |
| 27 - 14 | N27 | C14 | EZH1 - RELA | 1.03187224 | 0.02298941 |
| 285 - 7 | N285 | C7 | p65-MyoD - ZNF10 | 1.03086356 | 0.01694813 |
| 282 - 205 | N282 | C205 | VP160 - JMJD7_HUMAN | 1.03043851 | 0.00400922 |
| 346 - 14 | N346 | C14 | MSX2_HUMAN - RELA | 1.03038739 | 0.0300438 |
| 252 - 246 | N252 | C246 | HCFC1_HUMAN - | 1.02997078 | 0.03767331 |
| | | | ATRX_HUMAN | | |
| 153 - 281 | N153 | C281 | KAT7_HUMAN - VP64 | 1.02948056 | 0.04584821 |
| 294 - 291 | N294 | C291 | DIM5 - SS18 | 1.02947101 | 0.0389922 |
| 123 - 99 | N123 | C99 | KMT2A_HUMAN - | 1.02945396 | 0.01473389 |
| | | | IN80C_HUMAN | | |
| 295 - 250 | N295 | C250 | SET-TAF1B - | 1.02901382 | 0.0236325 |
| | | | HCFC1_HUMAN | | |
| 63 - 1 | N63 | C1 | SMYD5_HUMAN - SETD1A | 1.02778287 | 0.02627526 |
| 183 - 281 | N183 | C281 | KMT2C_HUMAN - VP64 | 1.02758921 | 0.0135268 |
| 25 - 12 | N25 | C12 | CTCFL - KMT2A | 1.02726157 | 0.0358928 |
| 73 - 99 | N73 | C99 | KDM5D_HUMAN - | 1.02430177 | 0.02536517 |
| | | | IN80C_HUMAN | | |
| 14 - 108 | N14 | C108 | RELA - KAT6B_HUMAN | 1.02415713 | 0.01884049 |
| 263 - 290 | N263 | C290 | HDAC8 - HP1aCS | 1.02162365 | 0.0182147 |
| 266 - 285 | N266 | C285 | GADD45A - p65-MyoD | 1.01983897 | 0.04469583 |
| 280 - 239 | N280 | C239 | CBF1-Cterm - | 1.01979531 | 0.03497921 |
| | | | KDM8_HUMAN | | |
| 56 - 35 | N56 | C35 | SUV92_HUMAN - | 1.01676902 | 0.04009927 |
| | | | VPR_JKNp64 | | |
| 35 - 324 | N35 | C324 | VPR_JKNp64 - | 1.01478733 | 0.01586394 |
| | | | LBR_HUMAN | | |
| 258 - 311 | N258 | C311 | Nejire-HAT - Sin3a | 1.01440308 | 0.03359209 |
| 3 - 285 | N3 | C285 | HDAC3 - p65-MyoD | 1.01422945 | 0.02760447 |
| 284 - 113 | N284 | C113 | p65-HSF1 - | 1.01361455 | 0.04309891 |
| | | | KDM5A_HUMAN | | |
| 250 - 73 | N250 | C73 | HCFC1_HUMAN - | 1.00934197 | 0.03097212 |
| | | | KDM5D_HUMAN | | |
| 257 - 58 | N257 | C58 | c-Myb-TAD - | 1.00894618 | 0.03462541 |
| | | | TF3C4_HUMAN | | |
| 210 - 14 | N210 | C14 | SIR3_HUMAN - RELA | 1.00887845 | 0.04950121 |
| 73 - 102 | N73 | C102 | KDM5D_HUMAN - | 1.00762846 | 0.03717307 |
| | | | TAF1_HUMAN | | |
| 284 - 173 | N284 | C173 | p65-HSF1 - SIR4_HUMAN | 1.00716464 | 0.03509227 |
| 17 - 29 | N17 | C291 | EZH2 - SS18 | 1.00633001 | 0.01615274 |
| 284 - 274 | N284 | C274 | p65-HSF1 - UBE2A | 1.00410496 | 0.00924136 |
| 63 - 17 | N63 | C17 | SMYD5_HUMAN - EZH2 | 1.00409871 | 0.03543477 |
| 268 - 280 | N268 | C280 | FOXA1-Cterm - CBF1-Cterm | 1.00226306 | 0.01746321 |
| 14 - 123 | N14 | C123 | RELA - KMT2A_HUMAN | 1.00156509 | 0.02522992 |
| 269 - 99 | N269 | C99 | PU.1 - IN80C_HUMAN | 1.00053884 | 0.02908537 |
| 136 - 1 | N136 | C1 | JMJD6_HUMAN - SETD1A | 0.99886188 | 0.01974094 |
| 218 - 313 | N218 | C313 | IN80B_HUMAN - SaII | 0.99875561 | 0.02849551 |
| 197 - 1 | N197 | C1 | SUV91_HUMAN - SETD1A | 0.99821636 | 0.04458237 |
| 295 - 257 | N295 | C257 | SET-TAF1B - c-Myb-TAD | 0.99761616 | 0.00737257 |
| 14 - 135 | N14 | C135 | RELA - KDM2A_HUMAN | 0.99692147 | 0.02179975 |
| 10 - 312 | N10 | C312 | HSF1 - SetD8 | 0.99307389 | 0.02813546 |
| 65 - 138 | N65 | C138 | MCRS1_HUMAN - | 0.99115754 | 0.03522588 |
| | | | TFPT_HUMAN | | |
| 335 - 285 | N335 | C285 | at_SUVR4 - p65-MyoD | 0.9897436 | 0.04514325 |
| 54 - 14 | N54 | C14 | CBP_HUMAN - RELA | 0.98640239 | 0.04570452 |
| 276 - 281 | N276 | C281 | EHMT2(G9a)-Cterm - VP64 | 0.98632034 | 0.00922971 |
| 106 - 99 | N106 | C99 | KAT6B_HUMAN - | 0.98594559 | 0.0073533 |
| | | | IN80C_HUMAN | | |
| 218 - 266 | N218 | C266 | IN80B_HUMAN - | 0.98525265 | 0.01743483 |
| | | | GADD45A | | |
| 281 - 177 | N281 | C177 | VP64 - KDM5C_HUMAN | 0.98381561 | 0.01533711 |
| 243 - 257 | N243 | C257 | DNMT1_HUMAN - c-Myb- | 0.98271225 | 0.04173652 |
| | | | TAD | | |
| 186 - 257 | N186 | C257 | RIOX2_HUMAN - c-Myb- | 0.98090591 | 0.00884522 |
| | | | TAD | | |
| 160 - 285 | N160 | C285 | KMT5A_HUMAN - p65- | 0.98041675 | 0.02626092 |
| | | | MyoD | | |
| 1 - 106 | N1 | C106 | SETD1A - KAT6B_HUMAN | 0.97738308 | 0.02082689 |
| 280 - 348 | N280 | C348 | CBF1-Cterm - | 0.97531875 | 0.02905937 |
| | | | BRDT_HUMAN | | |
| 274 - 291 | N274 | C291 | UBE2A - SS18 | 0.97088459 | 0.03631894 |
| 285 - 159 | N285 | C159 | p65-MyoD - | 0.97055193 | 0.03545823 |
| | | | SETB1_HUMAN | | |
| 324 - 257 | N324 | C257 | LBR_HUMAN - c-Myb-TAD | 0.9701607 | 0.0490446 |
| 229 - 281 | N229 | C281 | NFRKB_HUMAN - VP64 | 0.96902502 | 0.02766495 |
| 190 - 257 | N190 | C257 | ANM1_HUMAN - c-Myb- | 0.96660368 | 0.01269822 |
| | | | TAD | | |
| 329 - 284 | N329 | C284 | pbcv1_vSET - p65-HSF1 | 0.96382764 | 0.01806067 |
| 20 - 285 | N20 | C285 | KDM1B - p65-MyoD | 0.96243553 | 0.04196771 |
| 245 - 99 | N245 | C99 | TYY1_HUMAN - | 0.96199967 | 0.04472133 |
| | | | IN80C_HUMAN | | |
| 92 - 257 | N92 | C257 | SMYD1_HUMAN - c-Myb- | 0.9619325 | 0.01659486 |
| | | | TAD | | |
| 149 - 237 | N149 | C237 | MBD1_HUMAN - | 0.96138642 | 0.04860564 |
| | | | KAT5_HUMAN | | |
| 116 - 257 | N116 | C257 | ANM6_HUMAN - c-Myb- | 0.96096033 | 0.01414271 |
| | | | TAD | | |
| 263 - 257 | N263 | C257 | HDAC8 - c-Myb-TAD | 0.95772603 | 0.01000992 |
| 67 - 14 | N67 | C14 | PRDM9_HUMAN - RELA | 0.95671565 | 0.03431252 |
| 300 - 250 | N300 | C250 | SIRT6 - HCFC1_HUMAN | 0.95577046 | 0.03745966 |
| 212 - 138 | N212 | C138 | HDAC8_HUMAN - | 0.95319755 | 0.02445342 |
| | | | TFPT_HUMAN | | |
| 284 - 101 | N284 | C101 | p65-HSF1 - TAF1_HUMAN | 0.95219367 | 0.04281041 |
| 14 - 233 | N14 | C233 | RELA - HINFP_HUMAN | 0.9468737 | 0.04744352 |
| 275 - 17 | N275 | C17 | DOT1L-DOT1_domain - | 0.94683703 | 0.04738474 |
| | | | EZH2 | | |
| 280 - 173 | N280 | C173 | CBF1-Cterm - SIR4_HUMAN | 0.9448661 | 0.02896694 |
| 246 - 291 | N246 | C291 | ATRX_HUMAN - SS18 | 0.94378829 | 0.04174082 |
| 59 - 257 | N59 | C257 | INO80_HUMAN - c-Myb- | 0.94327685 | 0.0425688 |
| | | | TAD | | |
| 311 - 284 | N311 | C284 | Sin3a - p65-HSF1 | 0.94206185 | 0.02002131 |
| 14 - 331 | N14 | C331 | RELA - mm_G9a | 0.94200612 | 0.04138447 |
| 257 - 239 | N257 | C239 | c-Myb-TAD - | 0.94143201 | 0.02054801 |
| | | | KDM8_HUMAN | | |
| 327 - 257 | N327 | C257 | hs_NIPP1 - c-Myb-TAD | 0.94138298 | 0.02509911 |
| 295 - 280 | N295 | C280 | SET-TAF1B - CBF1-Cterm | 0.94049727 | 0.02013853 |
| 88 - 250 | N88 | C250 | ING4_HUMAN - | 0.93877685 | 0.04614257 |
| | | | HCFC1_HUMAN | | |
| 45 - 59 | N45 | C59 | KMT2D_HUMAN - | 0.93666925 | 0.044932 |
| | | | INO80_HUMAN | | |
| 35 - 312 | N35 | C312 | VPR_JKNp64 - SetD8 | 0.93495936 | 0.04209803 |
| 185 - 257 | N185 | C257 | RBBP7_HUMAN - c-Myb- | 0.93418701 | 0.04346015 |
| | | | TAD | | |
| 281 - 248 | N281 | C248 | VP64 - GLYR1_HUMAN | 0.93333171 | 0.03122294 |
| 106 - 200 | N106 | C200 | KAT6B_HUMAN - | 0.92752963 | 0.03974384 |
| | | | ARP5_HUMAN | | |
| 271 - 312 | N271 | C312 | GCN5 - SetD8 | 0.9264463 | 0.04583436 |
| 14 - 246 | N14 | C246 | RELA - ATRX_HUMAN | 0.925397 | 0.03251741 |
| 35 - 298 | N35 | C298 | VPR_JKNp64 - MBD2b | 0.92392242 | 0.02557586 |
| 305 - 284 | N305 | C284 | NUE - p65-HSF1 | 0.92341942 | 0.04372243 |
| 119 - 257 | N119 | C257 | ACL6A_HUMAN - c-Myb- | 0.92190457 | 0.01655259 |
| | | | TAD | | |
| 324 - 138 | N324 | C138 | LBR_HUMAN - | 0.92086817 | 0.03452895 |
| | | | TFPT_HUMAN | | |
| 20 - 14 | N20 | C14 | KDM1B - RELA | 0.91973814 | 0.04730788 |
| 250 - 290 | N250 | C290 | HCFC1_HUMAN - HP1aCS | 0.91915087 | 0.01546859 |
| 14 - 349 | N14 | C349 | RELA - DAM_N132A | 0.91836608 | 0.02015866 |
| 332 - 99 | N332 | C99 | hs_SIRT5 - IN80C_HUMAN | 0.91325631 | 0.04176604 |
| 285 - 126 | N285 | C126 | p65-MyoD - | 0.9131949 | 0.0240351 |
| | | | SETMR_HUMAN | | |
| 14 - 118 | N14 | C118 | RELA - HDAC6_HUMAN | 0.91190701 | 0.02969381 |
| 114 - 326 | N114 | C326 | KDM5A_HUMAN - pf_Sir2A | 0.90874231 | 0.0495106 |
| 310 - 99 | N310 | C99 | TgSET8 - IN80C_HUMAN | 0.90691429 | 0.03456457 |
| 12 - 285 | N12 | C285 | KMT2A - p65-MyoD | 0.90678049 | 0.02830441 |
| 295 - 245 | N295 | C245 | SET-TAF1B - | 0.90645733 | 0.0359991 |
| | | | TYY1_HUMAN | | |
| 186 - 290 | N186 | C290 | RIOX2_HUMAN - HP1aCS | 0.90402174 | 0.03598545 |
| 42 - 257 | N42 | C257 | KMT2E_HUMAN - c-Myb- | 0.90389605 | 0.02167323 |
| | | | TAD | | |
| 212 - 99 | N212 | C99 | HDAC8_HUMAN - | 0.90370205 | 0.02270657 |
| | | | IN80C_HUMAN | | |
| 14 - 272 | N14 | C272 | RELA - Sir2 | 0.8955985 | 0.0369525 |
| 5 - 66 | N5 | C66 | KDM1A - DOT1L_HUMAN | 0.89551079 | 0.04644566 |
| 296 - 214 | N296 | C214 | HP1a - HDAC4_HUMAN | 0.89239517 | 0.02667198 |
| 266 - 266 | N266 | C266 | GADD45A - GADD45A | 0.89183361 | 0.02379984 |
| 218 - 8 | N218 | C8 | IN80B_HUMAN - MECP2 | 0.89029861 | 0.04595099 |
| 218 - 290 | N218 | C290 | IN80B_HUMAN - HP1aCS | 0.88975429 | 0.01673461 |
| 32 - 285 | N32 | C285 | Gilbert_Lab_CRISPRi_KRAB - | 0.88872125 | 0.03012568 |
| | | | p65-MyoD | | |
| 246 - 59 | N246 | C59 | ATRX_HUMAN - | 0.88685519 | 0.03235477 |
| | | | INO80_HUMAN | | |
| 106 - 280 | N106 | C280 | KAT6B_HUMAN - CBF1 - | 0.88667192 | 0.02656272 |
| | | | Cterm | | |
| 14 - 310 | N14 | C310 | RELA - TgSET8 | 0.8843018 | 0.04743979 |
| 200 - 246 | N200 | C246 | ARP5_HUMAN - | 0.87738088 | 0.04443306 |
| | | | ATRX_HUMAN | | |
| 14 - 314 | N14 | C314 | RELA - MeCP2 | 0.87726172 | 0.03234951 |
| 48 - 285 | N48 | C285 | SETD5_HUMAN - p65- | 0.87283661 | 0.0449286 |
| | | | MyoD | | |
| 69 - 99 | N69 | C99 | SETB2_HUMAN - | 0.87174006 | 0.01554285 |
| | | | IN80C_HUMAN | | |
| 14 - 111 | N14 | C111 | RELA - KDM5A_HUMAN | 0.87159841 | 0.02269282 |
| 189 - 280 | N189 | C280 | ING2_HUMAN - CBF1- | 0.87109579 | 0.04880136 |
| | | | Cterm | | |
| 222 - 10 | N222 | C10 | IN80E_HUMAN - HSF1 | 0.8694092 | 0.03976155 |
| 14 - 320 | N14 | C320 | RELA - mMLL3-SET | 0.8693318 | 0.01608695 |
| 35 - 18 | N35 | C18 | VPR_JKNp64 - EZH2 | 0.86873738 | 0.04149399 |
| 150 - 257 | N150 | C257 | HDA11_HUMAN - c-Myb- | 0.86711792 | 0.02984073 |
| | | | TAD | | |
| 222 - 14 | N222 | C14 | IN80E_HUMAN - RELA | 0.86461968 | 0.0471924 |
| 174 - 99 | N174 | C99 | HDAC1_HUMAN - | 0.86366643 | 0.04609655 |
| | | | IN80C_HUMAN | | |
| 280 - 269 | N280 | C269 | CBF1-Cterm - PU.1 | 0.86242107 | 0.04696826 |
| 190 - 99 | N190 | C99 | ANM1_HUMAN - | 0.86038068 | 0.03947845 |
| | | | IN80C_HUMAN | | |
| 290 - 284 | N290 | C284 | HP1aCS - p65-HSF1 | 0.85515213 | 0.02260029 |
| 231 - 285 | N231 | C285 | KDM5B_HUMAN - p65- | 0.84615891 | 0.04190879 |
| | | | MyoD | | |
| 280 - 229 | N280 | C229 | CBF1-Cterm - | 0.837022 | 0.03379074 |
| | | | NFRKB_HUMAN | | |
| 61 - 99 | N61 | C99 | HAT1_HUMAN - | 0.8355363 | 0.04832549 |
| | | | IN80C_HUMAN | | |
| 151 - 14 | N151 | C14 | SIR7_HUMAN - RELA | 0.83467648 | 0.04268233 |
| 218 - 26 | N218 | C26 | IN80B_HUMAN - EZH1 | 0.8269143 | 0.04293645 |
| 253 - 257 | N253 | C257 | RBBP5_HUMAN - c-Myb- | 0.8269122 | 0.04785235 |
| | | | TAD | | |
| 282 - 88 | N282 | C88 | VP160 - ING4_HUMAN | 0.82293155 | 0.03972225 |
| 285 - 98 | N285 | C98 | p65-MyoD - | 0.82044313 | 0.02269891 |
| | | | A4FU79_HUMAN | | |
| 55 - 285 | N55 | C285 | RBBP4_HUMAN - p65- | 0.81982179 | 0.04886549 |
| | | | MyoD | | |
| 9 - 284 | N9 | C284 | MECP2 - p65-HSF1 | 0.8080385 | 0.03517797 |
| 253 - 269 | N253 | C269 | RBBP5_HUMAN - PU.1 | 0.80534336 | 0.04164577 |
| 105 - 284 | N105 | C284 | MBD2_HUMAN - p65-HSF1 | 0.80483477 | 0.04956215 |
| 328 - 257 | N328 | C257 | hs_PHF19 - c-Myb-TAD | 0.80294725 | 0.04287015 |
| 99 - 99 | N99 | C99 | IN80C_HUMAN - | 0.79630111 | 0.04566009 |
| | | | IN80C_HUMAN | | |
| 194 - 1 | N194 | C1 | ING1_HUMAN - SETD1A | 0.78982555 | 0.03754344 |
| 216 - 99 | N216 | C99 | ING5_HUMAN - | 0.78196225 | 0.03883945 |
| | | | IN80C_HUMAN | | |
| 88 - 269 | N88 | C269 | ING4_HUMAN - PU.1 | 0.77792268 | 0.03634269 |
| 212 - 233 | N212 | C233 | HDAC8_HUMAN - | 0.77670792 | 0.04425386 |
| | | | HINFP_HUMAN | | |
| 299 - 257 | N299 | C257 | HST2 - c-Myb-TAD | 0.77661449 | 0.04418636 |
| 15 - 106 | N15 | C106 | EP300 - KAT6B_HUMAN | 0.77447499 | 0.04507055 |
| 1 - 250 | N1 | C250 | SETD1A - HCFC1_HUMAN | 0.77323995 | 0.03659671 |
| 30 - 257 | N30 | C257 | KDM3A - c-Myb-TAD | 0.76793443 | 0.04381739 |
| 194 - 290 | N194 | C290 | ING1_HUMAN - HP1aCS | 0.76268834 | 0.04784584 |
| 280 - 154 | N280 | C154 | CBF1-Cterm - | 0.74507343 | 0.04830198 |
| | | | NSD2_HUMAN | | |
| 310 - 280 | N310 | C280 | TgSET8 - CBF1-Cterm | 0.74269989 | 0.04307829 |
| 294 - 257 | N294 | C257 | DIM5 - c-Myb-TAD | 0.71706963 | 0.04889726 |
| 305 - 105 | N305 | C105 | NUE - MBD2_HUMAN | −0.7096653 | 0.04890039 |
| 3- 26 | N3 | C26 | HDAC3 - EZH1 | −0.7280986 | 0.04472263 |
| 73 - 299 | N73 | C299 | KDM5D_HUMAN - HST2 | −0.7506284 | 0.04769153 |
| 105 - 59 | N105 | C59 | MBD2_HUMAN - | −0.7607073 | 0.0372834 |
| | | | INO80_HUMAN | | |
| 306 - 349 | N306 | C349 | CobB - DAM_N132A | −0.7611696 | 0.04946855 |
| 328 - 68 | N328 | C68 | hs_PHF19 - MBD3_HUMAN | −0.7668205 | 0.03863585 |
| 32 - 314 | N32 | C314 | Gilbert_Lab_CRISPRi_KRAB - | −0.7727348 | 0.04980644 |
| | | | MeCP2 | | |
| 105 - 330 | N105 | C330 | MBD2_HUMAN - ce_Set1 | −0.7732729 | 0.03148844 |
| 3 - 267 | N3 | C267 | HDAC3 - FOXA1-Nterm | −0.7818816 | 0.04538894 |
| 206 - 68 | N206 | C68 | SETD9_HUMAN - | −0.8019932 | 0.03645094 |
| | | | MBD3_HUMAN | | |
| 315 - 306 | N315 | C306 | NCoR - CobB | −0.8021611 | 0.0424883 |
| 249 - 105 | N249 | C105 | MTL5_HUMAN - | −0.8037262 | 0.03938878 |
| | | | MBD2_HUMAN | | |
| 346 - 9 | N346 | C9 | MSX2_HUMAN - MECP2 | −0.8037972 | 0.04314084 |
| 296 - 306 | N296 | C306 | HP1a - CobB | −0.807908 | 0.04798527 |
| 55 - 246 | N55 | C246 | RBBP4_HUMAN - | −0.8134488 | 0.02866591 |
| | | | ATRX_HUMAN | | |
| 198 - 306 | N198 | C306 | JMJD8_HUMAN - CobB | −0.8141974 | 0.04841622 |
| 55 - 305 | N55 | C305 | RBBP4_HUMAN - NUE | −0.8143865 | 0.03744856 |
| 331 - 299 | N331 | C299 | mm_G9a - HST2 | −0.816602 | 0.04339977 |
| 3 - 273 | N3 | C273 | HDAC3 - PRDM9-CD | −0.8170625 | 0.04851448 |
| 68 - 326 | N68 | C326 | MBD3_HUMAN - pf_Sir2A | −0.8174698 | 0.04014204 |
| 274 - 105 | N274 | C105 | UBE2A - MBD2_HUMAN | −0.8184059 | 0.03477752 |
| 9 - 217 | N9 | C217 | MECP2 - CHRC1_HUMAN | −0.8217543 | 0.04945116 |
| 3 - 205 | N3 | C205 | HDAC3 - JMJD7_HUMAN | −0.8268833 | 0.04448428 |
| 329 - 68 | N329 | C68 | pbcv1_vSET - | −0.827644 | 0.04879093 |
| | | | MBD3_HUMAN | | |
| 334 - 68 | N334 | C68 | hs_RCOR1 - | −0.8288154 | 0.02648879 |
| | | | MBD3_HUMAN | | |
| 271 - 105 | N271 | C105 | GCN5 - MBD2_HUMAN | −0.8302323 | 0.04540624 |
| 346 - 299 | N346 | C299 | MSX2_HUMAN - HST2 | −0.8321898 | 0.03194122 |
| 306 - 112 | N306 | C112 | CobB - KDM5A_HUMAN | −0.8332674 | 0.02212851 |
| 182 - 305 | N182 | C305 | MTA3_HUMAN - NUE | −0.833335 | 0.03446563 |
| 106 - 314 | N106 | C314 | KAT6B_HUMAN - MeCP2 | −0.8356044 | 0.04564956 |
| 88 - 191 | N88 | C191 | ING4_HUMAN - | −0.836365 | 0.04514178 |
| | | | CDYL_HUMAN | | |
| 55 - 18 | N55 | C18 | RBBP4_HUMAN - EZH2 | −0.837695 | 0.0351463 |
| 150 - 68 | N150 | C68 | HDA11_HUMAN - | −0.8383311 | 0.03239411 |
| | | | MBD3_HUMAN | | |
| 349 - 105 | N349 | C105 | DAM_N132A - | −0.8423693 | 0.02115676 |
| | | | MBD2_HUMAN | | |
| 9 - 32 | N9 | C32 | MECP2 - | −0.8430384 | 0.04090687 |
| | | | Gilbert_Lab_CRISPRi_KRAB | | |
| 324 - 68 | N324 | C68 | LBR_HUMAN - | −0.8469402 | 0.02458677 |
| | | | MBD3_HUMAN | | |
| 301 - 68 | N301 | C68 | SIRT3 - MBD3_HUMAN | −0.849936 | 0.02630305 |
| 280 - 191 | N280 | C191 | CBF1-Cterm - | −0.852393 | 0.045446 |
| | | | CDYL_HUMAN | | |
| 1 - 306 | N1 | C306 | SETD1A - CobB | −0.8528454 | 0.03349326 |
| 257 - 202 | N257 | C202 | c-Myb-TAD - | −0.8536751 | 0.02420565 |
| | | | KDM2B_HUMAN | | |
| 12 - 334 | N12 | C334 | KMT2A - hs_RCOR1 | −0.855811 | 0.0487242 |
| 306 - 98 | N306 | C98 | CobB - A4FU79_HUMAN | −0.8558462 | 0.02313278 |
| 99 - 334 | N99 | C334 | IN80C_HUMAN - | −0.8591778 | 0.04022742 |
| | | | hs RCOR1 | | |
| 257 - 306 | N257 | C306 | c-Myb-TAD - CobB | −0.8619406 | 0.04949716 |
| 64 - 8 | N64 | C8 | HDAC2_HUMAN - MECP2 | −0.861961 | 0.0357532 |
| 334 - 69 | N334 | C69 | hs_RCOR1 - | −0.8623571 | 0.03861085 |
| | | | SETB2_HUMAN | | |
| 106 - 306 | N106 | C306 | KAT6B_HUMAN - CobB | −0.8634006 | 0.03275628 |
| 306 - 73 | N306 | C73 | CobB - KDM5D_HUMAN | −0.8640893 | 0.02714014 |
| 331 - 293 | N331 | C293 | mm_G9a - KRAB-MeCP2 | −0.8660201 | 0.04798021 |
| 315 - 299 | N315 | C299 | NCoR - HST2 | −0.8666148 | 0.03328493 |
| 206 - 334 | N206 | C334 | SETD9_HUMAN - | −0.8667561 | 0.0306304 |
| | | | hs_RCOR1 | | |
| 3 - 274 | N3 | C274 | HDAC3 - UBE2A | −0.8689051 | 0.03155761 |
| 7 - 105 | N7 | C105 | ZNF10 - MBD2_HUMAN | −0.8703929 | 0.01206163 |
| 296 - 68 | N296 | C68 | HP1a - MBD3_HUMAN | −0.8748848 | 0.04379107 |
| 299 - 69 | N299 | C69 | HST2 - SETB2_HUMAN | −0.8794144 | 0.01603984 |
| 178 - 298 | N178 | C298 | KMT5C_HUMAN - MBD2b | −0.8804525 | 0.03691214 |
| 3 - 272 | N3 | C272 | HDAC3 - Sir2 | −0.8813947 | 0.04327273 |
| 3 - 302 | N3 | C302 | HDAC3 - HDAC11 | −0.8825378 | 0.03230839 |
| 295 - 55 | N295 | C55 | SET-TAF1B - | −0.8861273 | 0.02423242 |
| | | | RBBP4_HUMAN | | |
| 149 - 299 | N149 | C299 | MBD1_HUMAN - HST2 | −0.8862234 | 0.02155704 |
| 9 - 306 | N9 | C306 | MECP2 - CobB | −0.889198 | 0.02866609 |
| 116 - 306 | N116 | C306 | ANM6_HUMAN - CobB | −0.8913183 | 0.03528675 |
| 191 - 313 | N191 | C313 | CDYL_HUMAN - SaII | −0.8922318 | 0.03021425 |
| 14 - 105 | N14 | C105 | RELA - MBD2_HUMAN | −0.8927757 | 0.0128138 |
| 269 - 68 | N269 | C68 | PU.1 - MBD3_HUMAN | −0.8928238 | 0.04894686 |
| 93 - 105 | N93 | C105 | ACL6B_HUMAN - | −0.8944015 | 0.02505972 |
| | | | MBD2_HUMAN | | |
| 12 - 55 | N12 | C55 | KMT2A - RBBP4_HUMAN | −0.8960045 | 0.02749937 |
| 110 - 68 | N110 | C68 | JMJD4_HUMAN - | −0.8965348 | 0.02581839 |
| | | | MBD3_HUMAN | | |
| 55 - 320 | N55 | C320 | RBBP4_HUMAN - mMLL3- | −0.8978107 | 0.015056 |
| | | | SET | | |
| 293 - 313 | N293 | C313 | KRAB-MeCP2 - SaII | −0.898571 | 0.02459207 |
| 68 - 294 | N68 | C294 | MBD3_HUMAN - DIM5 | −0.8987594 | 0.04039954 |
| 344 - 32 | N344 | C32 | HDAC3_HUMAN - | −0.9005727 | 0.04177548 |
| | | | Gilbert_Lab_CRISPRi_KRAB | | |
| 317 - 105 | N317 | C105 | HDAC3 - MBD2_HUMAN | −0.9015505 | 0.0327984 |
| 165 - 257 | N165 | C257 | MTA2_HUMAN - c-Myb- | −0.9022729 | 0.04822938 |
| | | | TAD | | |
| 105 - 240 | N105 | C240 | MBD2_HUMAN - | −0.9030649 | 0.0429935 |
| | | | ANM3_HUMAN | | |
| 111 - 306 | N111 | C306 | KDM5A_HUMAN - CobB | −0.9031689 | 0.04109673 |
| 306 - 48 | N306 | C48 | CobB - SETD5_HUMAN | −0.9037086 | 0.0196052 |
| 306 - 173 | N306 | C173 | CobB - SIR4_HUMAN | −0.9040912 | 0.03412106 |
| 9 - 105 | N9 | C105 | MECP2 - MBD2_HUMAN | −0.9065253 | 0.01740606 |
| 293 - 8 | N293 | C8 | KRAB-MeCP2 - MECP2 | −0.912982 | 0.02534426 |
| 306 - 12 | N306 | C12 | CobB - KMT2A | −0.9148071 | 0.03554585 |
| 3 - 264 | N3 | C264 | HDAC3 - MTL5_HUMAN | −0.9148416 | 0.03063826 |
| 24 - 68 | N24 | C68 | CTCFL - MBD3_HUMAN | −0.9149332 | 0.02531457 |
| 298 - 59 | N298 | C59 | MBD2b - INO80_HUMAN | −0.9165078 | 0.02324262 |
| 64 - 68 | N64 | C68 | HDAC2_HUMAN - | −0.9181411 | 0.02030319 |
| | | | MBD3_HUMAN | | |
| 55 - 311 | N55 | C311 | RBBP4_HUMAN - Sin3a | −0.9205268 | 0.04200011 |
| 105 - 311 | N105 | C311 | MBD2_HUMAN - Sin3a | −0.9205612 | 0.01590709 |
| 17 - 306 | N17 | C306 | EZH2 - CobB | −0.9206735 | 0.02079487 |
| 299 - 70 | N299 | C70 | HST2 - SETB2_HUMAN | −0.920761 | 0.03547361 |
| 55 - 328 | N55 | C328 | RBBP4_HUMAN - | −0.9220582 | 0.04318922 |
| | | | hs_PHF19 | | |
| 196 - 111 | N196 | C111 | MTA1_HUMAN - | −0.923157 | 0.04443009 |
| | | | KDM5A_HUMAN | | |
| 3 - 187 | N3 | C187 | HDAC3 - MBD4_HUMAN | −0.9273379 | 0.03961541 |
| 152 - 314 | N152 | C314 | CDY1_HUMAN - MeCP2 | −0.9273586 | 0.02189626 |
| 3 - 90 | N3 | C90 | HDAC3 - CHD4_HUMAN | −0.9282359 | 0.01887574 |
| 298 - 222 | N298 | C222 | MBD2b - IN80E_HUMAN | −0.928589 | 0.04599651 |
| 345 - 306 | N345 | C306 | MSX2_HUMAN - CobB | −0.9288748 | 0.02803579 |
| 3 - 162 | N3 | C162 | HDAC3 - SIR6_HUMAN | −0.9301049 | 0.0376456 |
| 216 - 68 | N216 | C68 | ING5_HUMAN - | −0.9316134 | 0.04587804 |
| | | | MBD3_HUMAN | | |
| 148 - 32 | N148 | C32 | NSD3_HUMAN - | −0.9318579 | 0.01817869 |
| | | | Gilbert_Lab_CRISPRi_KRAB | | |
| 293 - 308 | N293 | C308 | KRAB-MeCP2 - HDT1 | −0.9320302 | 0.04996968 |
| 306 - 194 | N306 | C194 | CobB - ING1_HUMAN | −0.9321735 | 0.03835802 |
| 105 - 326 | N105 | C326 | MBD2_HUMAN - pf_Sir2A | −0.9323 | 0.01276008 |
| 217 - 306 | N217 | C306 | CHRC1_HUMAN - CobB | −0.9333309 | 0.01838788 |
| 55 - 294 | N55 | C294 | RBBP4_HUMAN - DIM5 | −0.9342276 | 0.01985834 |
| 313 - 185 | N313 | C185 | SaII - RBBP7_HUMAN | −0.9347245 | 0.02487677 |
| 105 - 67 | N105 | C67 | MBD2_HUMAN - | −0.934855 | 0.0376503 |
| | | | PRDM9_HUMAN | | |
| 317 - 77 | N317 | C77 | HDAC3 - KDM5D_HUMAN | −0.9349179 | 0.04230552 |
| 344 - 105 | N344 | C105 | HDAC3_HUMAN - | −0.9363938 | 0.04004722 |
| | | | MBD2_HUMAN | | |
| 240 - 306 | N240 | C306 | ANM3_HUMAN - CobB | −0.9373057 | 0.04617757 |
| 110 - 306 | N110 | C306 | JMJD4_HUMAN - CobB | −0.9424261 | 0.03735208 |
| 34 - 293 | N34 | C293 | DNMT3A-3L_JKNp112 - | −0.9426812 | 0.04476823 |
| | | | KRAB-MeCP2 | | |
| 344 - 68 | N344 | C68 | HDAC3_HUMAN - | −0.9428188 | 0.03167669 |
| | | | MBD3_HUMAN | | |
| 95 - 298 | N95 | C298 | SETD6_HUMAN - MBD2b | −0.943388 | 0.03196042 |
| 55 - 307 | N55 | C307 | RBBP4_HUMAN - KYP | −0.9443581 | 0.01114836 |
| 17 - 68 | N17 | C68 | EZH2 - MBD3_HUMAN | −0.9445766 | 0.02529228 |
| 105 - 198 | N105 | C198 | MBD2_HUMAN - | −0.9471001 | 0.01598412 |
| | | | JMJD8_HUMAN | | |
| 306 - 198 | N306 | C198 | CobB - JMJD8_HUMAN | −0.9481221 | 0.01793147 |
| 293 - 249 | N293 | C249 | KRAB-MeCP2 - HAC1-HAT | −0.9481891 | 0.04203393 |
| 136 - 334 | N136 | C334 | JMJD6_HUMAN - | −0.9486035 | 0.04148121 |
| | | | hs_RCOR1 | | |
| 106 - 191 | N106 | C191 | KAT6B_HUMAN - | −0.9493616 | 0.03925581 |
| | | | CDYL_HUMAN | | |
| 116 - 32 | N116 | C32 | ANM6_HUMAN - | −0.9493879 | 0.01467407 |
| | | | Gilbert_Lab_CRISPRi_KRAB | | |
| 182 - 266 | N182 | C266 | MTA3_HUMAN - | −0.9504726 | 0.04236039 |
| | | | GADD45A | | |
| 293 - 332 | N293 | C332 | KRAB-MeCP2 - hs_SIRT5 | −0.9510193 | 0.02525373 |
| 97 - 105 | N97 | C105 | CHD3_HUMAN - | −0.9510415 | 0.01450643 |
| | | | MBD2_HUMAN | | |
| 190 - 306 | N190 | C306 | ANM1_HUMAN - CobB | −0.9515736 | 0.02024869 |
| 107 - 98 | N107 | C98 | KAT6B_HUMAN - | −0.9518743 | 0.0393631 |
| | | | A4FU79_HUMAN | | |
| 123 - 293 | N123 | C293 | KMT2A_HUMAN - KRAB- | −0.9520689 | 0.01601515 |
| | | | MeCP2 | | |
| 105 - 113 | N105 | C113 | MBD2_HUMAN - | −0.9545914 | 0.0373083 |
| | | | KDM5A_HUMAN | | |
| 344 - 315 | N344 | C315 | HDAC3_HUMAN - NCoR | −0.9546251 | 0.0462916 |
| 55 - 346 | N55 | C346 | RBBP4_HUMAN - | −0.9547442 | 0.02125452 |
| | | | MSX2_HUMAN | | |
| 105 - 75 | N105 | C75 | MBD2_HUMAN - | −0.9563708 | 0.02831842 |
| | | | KDM5D_HUMAN | | |
| 182 - 17 | N182 | C17 | MTA3_HUMAN - EZH2 | −0.9567312 | 0.04275125 |
| 68 - 307 | N68 | C307 | MBD3_HUMAN - KYP | −0.957024 | 0.03190693 |
| 133 - 68 | N133 | C68 | KAT8_HUMAN - | −0.9588149 | 0.04965198 |
| | | | MBD3_HUMAN | | |
| 306 - 38 | N306 | C38 | CobB - EHMT2 | −0.9594752 | 0.01464886 |
| 114 - 312 | N114 | C312 | KDM5A_HUMAN - SetD8 | −0.9605539 | 0.04762153 |
| 68 - 205 | N68 | C205 | MBD3_HUMAN - | −0.9606339 | 0.01121701 |
| | | | JMJD7_HUMAN | | |
| 160 - 105 | N160 | C105 | KMT5A_HUMAN - | −0.9606821 | 0.04823924 |
| | | | MBD2_HUMAN | | |
| 7 - 314 | N7 | C314 | ZNF10 - MeCP2 | −0.9614913 | 0.03196762 |
| 182 - 329 | N182 | C329 | MTA3_HUMAN - | −0.9616121 | 0.03013193 |
| | | | pbcv1_vSET | | |
| 111 - 182 | N111 | C182 | KDM5A_HUMAN - | −0.9620861 | 0.03900995 |
| | | | MTA3_HUMAN | | |
| 182 - 127 | N182 | C127 | MTA3_HUMAN - | −0.9626564 | 0.04934178 |
| | | | SETMR_HUMAN | | |
| 182 - 98 | N182 | C98 | MTA3_HUMAN - | −0.9632167 | 0.03574115 |
| | | | A4FU79_HUMAN | | |
| 55 - 326 | N55 | C326 | RBBP4_HUMAN - pf_Sir2A | −0.9636666 | 0.03000368 |
| 314 - 56 | N314 | C56 | MeCP2 - SUV92_HUMAN | −0.9645615 | 0.02158173 |
| 344 - 241 | N344 | C241 | HDAC3_HUMAN - | −0.9651722 | 0.04465046 |
| | | | SIR2_HUMAN | | |
| 246 - 55 | N246 | C55 | ATRX_HUMAN - | −0.9677047 | 0.03384891 |
| | | | RBBP4_HUMAN | | |
| 17 - 159 | N17 | C159 | EZH2 - SETB1_HUMAN | −0.9679473 | 0.03800782 |
| 48 - 306 | N48 | C306 | SETD5_HUMAN - CobB | −0.9696999 | 0.01512652 |
| 68 - 213 | N68 | C213 | MBD3_HUMAN - | −0.9703471 | 0.02548835 |
| | | | HBAP1_HUMAN | | |
| 64 - 306 | N64 | C306 | HDAC2_HUMAN - CobB | −0.9704444 | 0.03382249 |
| 3 - 5 | N3 | C5 | HDAC3 - KDM1A | −0.9704956 | 0.04752246 |
| 152 - 306 | N152 | C306 | CDY1_HUMAN - CobB | −0.9705761 | 0.03678002 |
| 105 - 307 | N105 | C307 | MBD2_HUMAN - KYP | −0.9758561 | 0.00991856 |
| 70 - 272 | N70 | C272 | SETB2_HUMAN - Sir2 | −0.9759851 | 0.03902477 |
| 299 - 306 | N299 | C306 | HST2 - CobB | −0.9773907 | 0.0114648 |
| 334 - 306 | N334 | C306 | hs_RCOR1 - CobB | −0.9774973 | 0.01524066 |
| 222 - 120 | N222 | C120 | IN80E_HUMAN - | −0.9784421 | 0.04291692 |
| | | | RING1_HUMAN | | |
| 68 - 123 | N68 | C123 | MBD3_HUMAN - | −0.9792208 | 0.01066874 |
| | | | KMT2A_HUMAN | | |
| 306 - 214 | N306 | C214 | CobB - HDAC4_HUMAN | −0.9796415 | 0.01739203 |
| 55 - 130 | N55 | C130 | RBBP4_HUMAN - | −0.9796604 | 0.03691028 |
| | | | PRDM2_HUMAN | | |
| 68 - 249 | N68 | C249 | MBD3_HUMAN - HAC1- | −0.9800445 | 0.03910064 |
| | | | HAT | | |
| 306 - 315 | N306 | C315 | CobB - NCoR | −0.9814031 | 0.02475436 |
| 105 - 274 | N105 | C274 | MBD2_HUMAN - UBE2A | −0.9814465 | 0.01120869 |
| 18 - 334 | N18 | C334 | EZH2 - hs_RCOR1 | −0.9816402 | 0.03436169 |
| 51 - 298 | N51 | C298 | UCHL5_HUMAN - MBD2b | −0.9831036 | 0.00782736 |
| 306 - 132 | N306 | C132 | CobB - PRDM2_HUMAN | −0.9857575 | 0.04542866 |
| 299 - 118 | N299 | C118 | HST2 - HDAC6_HUMAN | −0.9862852 | 0.0425698 |
| 301 - 298 | N301 | C298 | SIRT3 - MBD2b | −0.9871333 | 0.0304159 |
| 317 - 271 | N317 | C271 | HDAC3 - GCN5 | −0.9872627 | 0.02946941 |
| 317 - 7 | N317 | C7 | HDAC3 - ZNF10 | −0.9876734 | 0.03968013 |
| 108 - 241 | N108 | C241 | KAT6B_HUMAN - | −0.9887059 | 0.03349353 |
| | | | SIR2_HUMAN | | |
| 105 - 305 | N105 | C305 | MBD2_HUMAN - NUE | −0.9895004 | 0.00665336 |
| 324 - 272 | N324 | C272 | LBR_HUMAN - Sir2 | −0.9921594 | 0.02832094 |
| 268 - 241 | N268 | C241 | FOXA1-Cterm - | −0.9927853 | 0.02868779 |
| | | | SIR2_HUMAN | | |
| 105 - 317 | N105 | C317 | MBD2_HUMAN - HDAC3 | −0.9934778 | 0.02458553 |
| 173 - 68 | N173 | C68 | SIR4_HUMAN - | −0.9946145 | 0.01087598 |
| | | | MBD3_HUMAN | | |
| 222 - 9 | N222 | C9 | IN80E_HUMAN - MECP2 | −0.9948162 | 0.01560088 |
| 315 - 293 | N315 | C293 | NCoR - KRAB-MeCP2 | −0.9969902 | 0.01413661 |
| 334 - 314 | N334 | C314 | hs_RCOR1 - MeCP2 | −0.9974173 | 0.01654964 |
| 216 - 215 | N216 | C215 | ING5_HUMAN - | −0.997547 | 0.02084241 |
| | | | HDAC4_HUMAN | | |
| 218 - 32 | N218 | C32 | IN80B_HUMAN - | −0.9976831 | 0.018373 |
| | | | Gilbert_Lab_CRISPRi_KRAB | | |
| 275 - 68 | N275 | C68 | DOT1L-DOT1_domain - | −0.9977186 | 0.00818521 |
| | | | MBD3_HUMAN | | |
| 298 - 302 | N298 | C302 | MBD2b - HDAC11 | −0.9980778 | 0.01509792 |
| 3 - 329 | N3 | C329 | HDAC3 - pbcv1_vSET | −1.0004442 | 0.03371301 |
| 324 - 101 | N324 | C101 | LBR_HUMAN - | −1.0006384 | 0.03727279 |
| | | | TAF1_HUMAN | | |
| 299 - 315 | N299 | C315 | HST2 - NCoR | −1.0008074 | 0.00769792 |
| 130 - 105 | N130 | C105 | PRDM2_HUMAN - | −1.0009196 | 0.00905205 |
| | | | MBD2_HUMAN | | |
| 241 - 313 | N241 | C313 | SIR2_HUMAN - SaII | −1.0009662 | 0.04141994 |
| 299 - 314 | N299 | C314 | HST2 - MeCP2 | −1.0021141 | 0.01681023 |
| 26 - 191 | N26 | C191 | EZH1 - CDYL_HUMAN | −1.0021514 | 0.03385219 |
| 105 - 253 | N105 | C253 | MBD2_HUMAN - | −1.0022448 | 0.02858658 |
| | | | RBBP5_HUMAN | | |
| 55 - 271 | N55 | C271 | RBBP4_HUMAN - GCN5 | −1.0027822 | 0.00876914 |
| 48 - 105 | N48 | C105 | SETD5_HUMAN - | −1.0030502 | 0.03034523 |
| | | | MBD2_HUMAN | | |
| 105 -205 | N105 | C205 | MBD2_HUMAN - | −1.003914 | 0.02100605 |
| | | | JMJD7_HUMAN | | |
| 68 - 12 | N68 | C12 | MBD3_HUMAN - KMT2A | −1.0051479 | 0.02385168 |
| 246 - 191 | N246 | C191 | ATRX_HUMAN - | −1.0056981 | 0.04822208 |
| | | | CDYL_HUMAN | | |
| 112 - 299 | N112 | C299 | KDM5A_HUMAN - HST2 | −1.0066206 | 0.02799353 |
| 334 - 24 | N334 | C24 | hs_RCOR1 - CTCFL | −1.0086335 | 0.04752628 |
| 55 - 218 | N55 | C218 | RBBP4_HUMAN - | −1.0107754 | 0.03250857 |
| | | | IN80B_HUMAN | | |
| 105 - 199 | N105 | C199 | MBD2_HUMAN - | −1.0110029 | 0.02683139 |
| | | | ING3_HUMAN | | |
| 127 - 55 | N127 | C55 | SETMR_HUMAN - | −1.0119695 | 0.02153403 |
| | | | RBBP4_HUMAN | | |
| 307 - 32 | N307 | C32 | KYP - | −1.011974 | 0.00745792 |
| | | | Gilbert_Lab_CRISPRi_KRAB | | |
| 341 - 257 | N341 | C257 | NCOR2_HUMAN - c-Myb- | −1.0141537 | 0.03607145 |
| | | | TAD | | |
| 344 - 187 | N344 | C187 | HDAC3_HUMAN - | −1.0143205 | 0.03945905 |
| | | | MBD4_HUMAN | | |
| 275 - 306 | N275 | C306 | DOT1L-DOT1_domain - | −1.014421 | 0.01379276 |
| | | | CobB | | |
| 312 - 32 | N312 | C32 | SetD8 - | −1.0168854 | 0.02452912 |
| | | | Gilbert_Lab_CRISPRi_KRAB | | |
| 68 - 63 | N68 | C63 | MBD3_HUMAN - | −1.0169899 | 0.04052079 |
| | | | SMYD5_HUMAN | | |
| 21 - 293 | N21 | C293 | KDM1B - KRAB-MeCP2 | −1.0199815 | 0.04617611 |
| 151 - 299 | N151 | C299 | SIR7_HUMAN - HST2 | −1.02137 | 0.03740468 |
| 257 - 334 | N257 | C334 | c-Myb-TAD - hs_RCOR1 | −1.0230369 | 0.04536257 |
| 297 - 306 | N297 | C306 | MesoLo - CobB | −1.02341 | 0.03193605 |
| 3 - 123 | N3 | C123 | HDAC3 - KMT2A_HUMAN | −1.02393 | 0.03003599 |
| 68 - 190 | N68 | C190 | MBD3_HUMAN - | −1.0240703 | 0.03888487 |
| | | | ANM1_HUMAN | | |
| 216 - 191 | N216 | C191 | ING5_HUMAN - | −1.0249298 | 0.02154985 |
| | | | CDYL_HUMAN | | |
| 306 - 346 | N306 | C346 | CobB - MSX2_HUMAN | −1.0258624 | 0.01337699 |
| 266 - 105 | N266 | C105 | GADD45A - | −1.0260416 | 0.01802933 |
| | | | MBD2_HUMAN | | |
| 205 - 68 | N205 | C68 | JMJD7_HUMAN - | −1.0262792 | 0.00861769 |
| | | | MBD3_HUMAN | | |
| 112 - 306 | N112 | C306 | KDM5A_HUMAN - CobB | −1.0268359 | 0.01298875 |
| 299 - 255 | N299 | C255 | HST2 - EED_HUMAN | −1.0270233 | 0.01984675 |
| 37 - 105 | N37 | C105 | KDM6A - MBD2_HUMAN | −1.0273041 | 0.04264092 |
| 55- 301 | N55 | C301 | RBBP4_HUMAN - SIRT3 | −1.028757 | 0.01989918 |
| 345 - 191 | N345 | C191 | MSX2_HUMAN - | −1.0292576 | 0.03045319 |
| | | | CDYL_HUMAN | | |
| 219 - 32 | N219 | C32 | JARD2_HUMAN - | −1.0296542 | 0.0333184 |
| | | | Gilbert_Lab_CRISPRi_KRAB | | |
| 1 - 68 | N1 | C68 | SETD1A - MBD3_HUMAN | −1.0302828 | 0.03628168 |
| 334 - 255 | N334 | C255 | hs_RCOR1 - EED_HUMAN | −1.0303542 | 0.02091723 |
| 55 - 308 | N55 | C308 | RBBP4_HUMAN - HDT1 | −1.031211 | 0.00627947 |
| 112 - 215 | N112 | C215 | KDM5A_HUMAN - | −1.0312786 | 0.0314425 |
| | | | HDAC4_HUMAN | | |
| 68 - 26 | N68 | C26 | MBD3_HUMAN - EZH1 | −1.03205 | 0.04652736 |
| 3 - 248 | N3 | C248 | HDAC3 - GLYR1_HUMAN | −1.0320535 | 0.04209586 |
| 202 - 246 | N202 | C246 | KDM2B_HUMAN - | −1.0321336 | 0.03609716 |
| | | | ATRX_HUMAN | | |
| 153 - 105 | N153 | C105 | KAT7_HUMAN - | −1.0321752 | 0.03474105 |
| | | | MBD2_HUMAN | | |
| 55 - 26 | N55 | C26 | RBBP4_HUMAN - EZH1 | −1.0325618 | 0.00382336 |
| 75 - 179 | N75 | C179 | KDM5D_HUMAN - | −1.0332611 | 0.04263479 |
| | | | SMRD2_HUMAN | | |
| 306 - 334 | N306 | C334 | CobB - hs_RCOR1 | −1.0337931 | 0.00749476 |
| 331 - 306 | N331 | C306 | mm_G9a - CobB | −1.0343478 | 0.02671083 |
| 131 - 346 | N131 | C346 | PRDM2_HUMAN - | −1.0348068 | 0.0322101 |
| | | | MSX2_HUMAN | | |
| 17 - 55 | N17 | C55 | EZH2 - RBBP4_HUMAN | −1.0350938 | 0.03747672 |
| 3 - 116 | N3 | C116 | HDAC3 - ANM6_HUMAN | −1.0352093 | 0.03325349 |
| 3 - 301 | N3 | C301 | HDAC3 - SIRT3 | −1.0391541 | 0.03204255 |
| 315 - 191 | N315 | C191 | NCoR - CDYL_HUMAN | −1.039578 | 0.01975919 |
| 55 -1 | N55 | C1 | RBBP4_HUMAN - SETD1A | −1.0397781 | 0.00530034 |
| 198 - 105 | N198 | C105 | JMJD8_HUMAN - | −1.0412798 | 0.00423853 |
| | | | MBD2_HUMAN | | |
| 55 - 233 | N55 | C233 | RBBP4_HUMAN - | −1.0421154 | 0.00651682 |
| | | | HINFP_HUMAN | | |
| 105 - 277 | N105 | C277 | MBD2_HUMAN - SUV39H1 | −1.0424544 | 0.04269971 |
| 344 - 348 | N344 | C348 | HDAC3_HUMAN - | −1.0426226 | 0.04060724 |
| | | | BRDT_HUMAN | | |
| 45 - 131 | N45 | C131 | KMT2D_HUMAN - | −1.0433583 | 0.04672602 |
| | | | PRDM2_HUMAN | | |
| 61 - 189 | N61 | C189 | HAT1_HUMAN - | −1.0447386 | 0.04556948 |
| | | | ING2_HUMAN | | |
| 206 - 299 | N206 | C299 | SETD9_HUMAN - HST2 | −1.0456466 | 0.01341223 |
| 312 - 191 | N312 | C191 | SetD8 - CDYL_HUMAN | −1.0458998 | 0.02742139 |
| 8 - 306 | N8 | C306 | MECP2 - CobB | −1.0463324 | 0.01851408 |
| 198 - 298 | N198 | C298 | JMJD8_HUMAN - MBD2b | −1.0465953 | 0.04175433 |
| 317 - 133 | N317 | C133 | HDAC3 - KAT8_HUMAN | −1.0471015 | 0.0189839 |
| 114 - 105 | N114 | C105 | KDM5A_HUMAN - | −1.0474753 | 0.00833394 |
| | | | MBD2_HUMAN | | |
| 280 - 68 | N280 | C68 | CBF1-Cterm - | −1.0477046 | 0.02004965 |
| | | | MBD3_HUMAN | | |
| 68 - 85 | N68 | C85 | MBD3_HUMAN - | −1.0496158 | 0.01143337 |
| | | | SMYD3_HUMAN | | |
| 336 - 332 | N336 | C332 | ce_Set4 - hs_SIRT5 | −1.050722 | 0.04477041 |
| 3 - 349 | N3 | C349 | HDAC3 - DAM_N132A | −1.0512051 | 0.00473302 |
| 293 - 216 | N293 | C216 | KRAB-MeCP2 - | −1.0517161 | 0.02351314 |
| | | | ING5_HUMAN | | |
| 314 - 328 | N314 | C328 | MeCP2 - hs_PHF19 | −1.0517575 | 0.04588606 |
| 306 - 56 | N306 | C56 | CobB - SUV92_HUMAN | −1.0522014 | 0.00489633 |
| 306 - 327 | N306 | C327 | CobB - hs_NIPP1 | −1.0529254 | 0.02130192 |
| 306 - 213 | N306 | C213 | CobB - HBAP1_HUMAN | −1.0537058 | 0.02395416 |
| 174 - 55 | N174 | C55 | HDAC1_HUMAN - | −1.0539197 | 0.02328572 |
| | | | RBBP4_HUMAN | | |
| 3 - 113 | N3 | C113 | HDAC3 - KDM5A_HUMAN | −1.0548659 | 0.04255794 |
| 68 - 99 | N68 | C99 | MBD3_HUMAN - | −1.0552102 | 0.02292798 |
| | | | IN80C_HUMAN | | |
| 298 - 98 | N298 | C98 | MBD2b - A4FU79_HUMAN | −1.0559273 | 0.04032337 |
| 99 - 105 | N99 | C105 | IN80C_HUMAN - | −1.0569275 | 0.01439029 |
| | | | MBD2_HUMAN | | |
| 306 - 339 | N306 | C339 | CobB - SPOC1_HUMAN | −1.0585621 | 0.02610275 |
| 306 - 165 | N306 | C165 | CobB - MTA2_HUMAN | −1.0598681 | 0.02006791 |
| 346 - 306 | N346 | C306 | MSX2_HUMAN - CobB | −1.0609136 | 0.00555032 |
| 317 - 130 | N317 | C130 | HDAC3 - PRDM2_HUMAN | −1.0615276 | 0.0246484 |
| 55 - 312 | N55 | C312 | RBBP4_HUMAN - SetD8 | −1.0620524 | 0.03251547 |
| 246 - 152 | N246 | C152 | ATRX_HUMAN - | −1.0625222 | 0.01554699 |
| | | | CDY1_HUMAN | | |
| 53 - 272 | N53 | C272 | CBP_HUMAN - Sir2 | −1.0625649 | 0.02332174 |
| 222 - 255 | N222 | C255 | IN80E_HUMAN - | −1.0626487 | 0.02513504 |
| | | | EED_HUMAN | | |
| 42 - 105 | N42 | C105 | KMT2E_HUMAN - | −1.0628727 | 0.01940013 |
| | | | MBD2_HUMAN | | |
| 185 - 32 | N185 | C32 | RBBP7_HUMAN - | −1.0663611 | 0.01023072 |
| | | | Gilbert_Lab_CRISPRi_KRAB | | |
| 298 - 123 | N298 | C123 | MBD2b - KMT2A_HUMAN | −1.0663868 | 0.01047282 |
| 298 - 127 | N298 | C127 | MBD2b - SETMR_HUMAN | −1.0673426 | 0.00661031 |
| 68 - 47 | N68 | C47 | MBD3_HUMAN - | −1.0684175 | 0.03477035 |
| | | | ANM2_HUMAN | | |
| 313 - 182 | N313 | C182 | SaII - MTA3_HUMAN | −1.068855 | 0.04365798 |
| 298 - 183 | N298 | C183 | MBD2b - KMT2C_HUMAN | −1.0691228 | 0.0196351 |
| 68 - 73 | N68 | C73 | MBD3_HUMAN - | −1.0692642 | 0.0196972 |
| | | | KDM5D_HUMAN | | |
| 105 - 301 | N105 | C301 | MBD2_HUMAN - SIRT3 | −1.0701441 | 0.00486377 |
| 334 - 299 | N334 | C299 | hs_RCOR1 - HST2 | −1.0720622 | 0.00925233 |
| 256 - 349 | N256 | C349 | LSD1-ORF - DAM_N132A | −1.0720979 | 0.0381458 |
| 306 - 27 | N306 | C27 | CobB - EZH1 | −1.0734454 | 0.0105935 |
| 329 - 293 | N329 | C293 | pbcv1_vSET - KRAB-MeCP2 | −1.0744457 | 0.02274611 |
| 306 - 212 | N306 | C212 | CobB - HDAC8_HUMAN | −1.0748079 | 0.01609368 |
| 8 - 105 | N8 | C105 | MECP2 - MBD2_HUMAN | −1.0756978 | 0.04662386 |
| 76 - 105 | N76 | C105 | KDM5D_HUMAN - | −1.077082 | 0.01579199 |
| | | | MBD2_HUMAN | | |
| 9 - 298 | N9 | C298 | MECP2 - MBD2b | −1.0772667 | 0.0109274 |
| 273 - 334 | N273 | C334 | PRDM9-CD - hs_RCOR1 | −1.0773677 | 0.03734943 |
| 309 - 189 | N309 | C189 | HDAC8 - ING2_HUMAN | −1.0791442 | 0.02960011 |
| 313 - 210 | N313 | C210 | SaII - SIR3_HUMAN | −1.0797043 | 0.02118921 |
| 263 - 105 | N263 | C105 | HDAC8 - MBD2_HUMAN | −1.0812784 | 0.00895141 |
| 345 - 120 | N345 | C120 | MSX2_HUMAN - | −1.0819609 | 0.01629167 |
| | | | RING1_HUMAN | | |
| 246 - 215 | N246 | C215 | ATRX_HUMAN - | −1.0826768 | 0.01786685 |
| | | | HDAC4_HUMAN | | |
| 119 - 105 | N119 | C105 | ACL6A_HUMAN - | −1.0853299 | 0.03819898 |
| | | | MBD2_HUMAN | | |
| 105 - 95 | N105 | C95 | MBD2_HUMAN - | −1.0853915 | 0.01019326 |
| | | | SETD6_HUMAN | | |
| 182 - 51 | N182 | C51 | MTA3_HUMAN - | −1.0854769 | 0.04632882 |
| | | | UCHL5_HUMAN | | |
| 269 - 306 | N269 | C306 | PU.1 - CobB | −1.0896083 | 0.01396673 |
| 297 - 299 | N297 | C299 | MesoLo - HST2 | −1.0900788 | 0.03427989 |
| 227 - 299 | N227 | C299 | SIR1_HUMAN - HST2 | −1.0914553 | 0.0444958 |
| 345 - 68 | N345 | C68 | MSX2_HUMAN - | −1.0921822 | 0.02653435 |
| | | | MBD3_HUMAN | | |
| 67 - 298 | N67 | C298 | PRDM9_HUMAN - MBD2b | −1.0927784 | 0.00608492 |
| 324 - 105 | N324 | C105 | LBR_HUMAN - | −1.0933781 | 0.00415363 |
| | | | MBD2_HUMAN | | |
| 204 - 32 | N204 | C32 | HIFIN_HUMAN - | −1.0951782 | 0.02901006 |
| | | | Gilbert_Lab_CRISPRi_KRAB | | |
| 306 - 305 | N306 | C305 | CobB - NUE | −1.0951921 | 0.01311964 |
| 216 - 7 | N216 | C7 | ING5_HUMAN - ZNF10 | −1.0960796 | 0.02381687 |
| 257 - 165 | N257 | C165 | c-Myb-TAD - | −1.0961791 | 0.02207992 |
| | | | MTA2_HUMAN | | |
| 106 - 182 | N106 | C182 | KAT6B_HUMAN - | −1.0963274 | 0.03748168 |
| | | | MTA3_HUMAN | | |
| 302 - 306 | N302 | C306 | HDAC11 - CobB | −1.0968145 | 0.03436083 |
| 306 - 310 | N306 | C310 | CobB - TgSET8 | −1.0974434 | 0.00531421 |
| 45 - 298 | N45 | C298 | KMT2D_HUMAN - MBD2b | −1.100898 | 0.00419112 |
| 299 - 298 | N299 | C298 | HST2 - MBD2b | −1.1021451 | 0.00780196 |
| 55 - 110 | N55 | C110 | RBBP4_HUMAN - | −1.1028697 | 0.03485299 |
| | | | JMJD4_HUMAN | | |
| 299 - 226 | N299 | C226 | HST2 - SETD2_HUMAN | −1.10321 | 0.0062239 |
| 105 - 349 | N105 | C349 | MBD2_HUMAN - | −1.1045283 | 0.00773046 |
| | | | DAM_N132A | | |
| 306 - 217 | N306 | C217 | CobB - CHRC1_HUMAN | −1.1060173 | 0.00741513 |
| 344 - 313 | N344 | C313 | HDAC3_HUMAN - SaII | −1.1072537 | 0.00410744 |
| 38 - 32 | N38 | C32 | EHMT2 - | −1.1089348 | 0.0053771 |
| | | | Gilbert_Lab_CRISPRi_KRAB | | |
| 55 - 187 | N55 | C187 | RBBP4_HUMAN - | −1.1096985 | 0.01470158 |
| | | | MBD4_HUMAN | | |
| 182 - 312 | N182 | C312 | MTA3_HUMAN - SetD8 | −1.1107623 | 0.0301305 |
| 154 - 306 | N154 | C306 | NSD2_HUMAN - CobB | −1.1107746 | 0.02936919 |
| 298 - 173 | N298 | C173 | MBD2b - SIR4_HUMAN | −1.1108274 | 0.01039517 |
| 296 - 206 | N296 | C206 | HP1a - SETD9_HUMAN | −1.1118594 | 0.0150508 |
| 7 - 334 | N7 | C334 | ZNF10 - hs_RCOR1 | −1.1122925 | 0.01654218 |
| 3 - 77 | N3 | C77 | HDAC3 - KDM5D_HUMAN | −1.1129116 | 0.01768058 |
| 3 - 56 | N3 | C56 | HDAC3 - SUV92_HUMAN | −1.1129828 | 0.00512942 |
| 167 - 315 | N167 | C315 | EHMT1_HUMAN - NCoR | −1.1133318 | 0.01265285 |
| 69 - 344 | N69 | C344 | SETB2_HUMAN - | −1.1136108 | 0.02906772 |
| | | | HDAC3_HUMAN | | |
| 231 - 298 | N231 | C298 | KDM5B_HUMAN - MBD2b | −1.1141531 | 0.02679908 |
| 18 - 299 | N18 | C299 | EZH2 - HST2 | −1.114752 | 0.01760116 |
| 199 - 105 | N199 | C105 | ING3_HUMAN - | −1.1151373 | 0.01571416 |
| | | | MBD2_HUMAN | | |
| 73 - 334 | N73 | C334 | KDM5D_HUMAN - | −1.1152733 | 0.01368043 |
| | | | hs RCOR1 | | |
| 107 - 334 | N107 | C334 | KAT6B_HUMAN - | −1.1153376 | 0.03956565 |
| | | | hs_RCOR1 | | |
| 165 - 269 | N165 | C269 | MTA2_HUMAN - PU.1 | −1.1166466 | 0.01598225 |
| 306 - 150 | N306 | C150 | CobB - HDA11_HUMAN | −1.116721 | 0.01084533 |
| 334 - 328 | N334 | C328 | hs_RCOR1 - hs_PHF19 | −1.1167772 | 0.02960846 |
| 68 - 297 | N68 | C297 | MBD3_HUMAN - MesoLo | −1.1168196 | 0.00304578 |
| 68 - 56 | N68 | C56 | MBD3_HUMAN - | −1.1173499 | 0.00658753 |
| | | | SUV92_HUMAN | | |
| 306 - 274 | N306 | C274 | CobB - UBE2A | −1.1174172 | 0.01252272 |
| 68 - 346 | N68 | C346 | MBD3_HUMAN - | −1.117736 | 0.01061328 |
| | | | MSX2_HUMAN | | |
| 215 - 326 | N215 | C326 | HDAC4_HUMAN - pf_Sir2A | −1.1179218 | 0.03662769 |
| 68 - 287 | N68 | C287 | MBD3_HUMAN - G9A[SET] | −1.1181832 | 0.00642735 |
| 112 - 68 | N112 | C68 | KDM5A_HUMAN - | −1.1183068 | 0.03925258 |
| | | | MBD3_HUMAN | | |
| 105 - 213 | N105 | C213 | MBD2_HUMAN - | −1.1184602 | 0.01341649 |
| | | | HBAP1_HUMAN | | |
| 220 - 68 | N220 | C68 | JARD2_HUMAN - | −1.1187564 | 0.01678901 |
| | | | MBD3_HUMAN | | |
| 105 -250 | N105 | C250 | MBD2_HUMAN - | −1.1192258 | 0.00772996 |
| | | | HCFC1_HUMAN | | |
| 164 - 334 | N164 | C334 | SIR5_HUMAN - hs_RCOR1 | −1.1193037 | 0.02821446 |
| 119 - 298 | N119 | C298 | ACL6A_HUMAN - MBD2b | −1.1196597 | 0.03617778 |
| 298 - 158 | N298 | C158 | MBD2b - SETB1_HUMAN | −1.1205985 | 0.03801515 |
| 3 - 271 | N3 | C271 | HDAC3 - GCN5 | −1.1214741 | 0.01383531 |
| 315 - 215 | N315 | C215 | NCoR - HDAC4_HUMAN | −1.1219799 | 0.0174359 |
| 334 - 107 | N334 | C107 | hs_RCOR1 - | −1.1226131 | 0.02028194 |
| | | | KAT6B_HUMAN | | |
| 298 - 339 | N298 | C339 | MBD2b - SPOC1_HUMAN | −1.1230257 | 0.04903756 |
| 57 - 306 | N57 | C306 | ANM8_HUMAN - CobB | −1.1230637 | 0.01005067 |
| 68 - 77 | N68 | C77 | MBD3_HUMAN - | −1.1230837 | 0.01501509 |
| | | | KDM5D_HUMAN | | |
| 100 - 105 | N100 | C105 | TAF1_HUMAN - | −1.1232314 | 0.0091678 |
| | | | MBD2_HUMAN | | |
| 334 - 105 | N334 | C105 | hs_RCOR1 - | −1.1232924 | 0.00202709 |
| | | | MBD2_HUMAN | | |
| 277 - 68 | N277 | C68 | SUV39H1 - MBD3_HUMAN | −1.1238133 | 0.02717255 |
| 345 - 131 | N345 | C131 | MSX2_HUMAN - | −1.1250176 | 0.0479504 |
| | | | PRDM2_HUMAN | | |
| 313 - 189 | N313 | C189 | SaII - ING2_HUMAN | −1.1255031 | 0.01270411 |
| 293 - 288 | N293 | C288 | KRAB-MeCP2 - SUV[SET] | −1.1269544 | 0.04504326 |
| 306 - 276 | N306 | C276 | CobB - EHMT2(G9a)-Cterm | −1.1276173 | 0.04340083 |
| 266 - 293 | N266 | C293 | GADD45A - KRAB-MeCP2 | −1.1281033 | 0.02028235 |
| 105 - 177 | N105 | C177 | MBD2_HUMAN - | −1.1281501 | 0.01443018 |
| | | | KDM5C_HUMAN | | |
| 345 - 186 | N345 | C186 | MSX2_HUMAN - | −1.1287238 | 0.03444423 |
| | | | RIOX2_HUMAN | | |
| 68 - 296 | N68 | C296 | MBD3_HUMAN - HP1a | −1.129694 | 0.02562654 |
| 105 - 98 | N105 | C98 | MBD2_HUMAN - | −1.1301046 | 0.00639036 |
| | | | A4FU79_HUMAN | | |
| 3 - 9 | N3 | C9 | HDAC3 - MECP2 | −1.1303388 | 0.0186794 |
| 105 - 221 | N105 | C221 | MBD2_HUMAN - | −1.1309518 | 0.01244784 |
| | | | SMYD2_HUMAN | | |
| 105 - 136 | N105 | C136 | MBD2_HUMAN - | −1.1314019 | 0.0255724 |
| | | | JMJD6_HUMAN | | |
| 306 - 302 | N306 | C302 | CobB - HDAC11 | −1.1316662 | 0.00518394 |
| 133 - 241 | N133 | C241 | KAT8_HUMAN - | −1.1317431 | 0.02850798 |
| | | | SIR2_HUMAN | | |
| 105 - 130 | N105 | C130 | MBD2_HUMAN - | −1.132387 | 0.00775862 |
| | | | PRDM2_HUMAN | | |
| 95 - 68 | N95 | C68 | SETD6_HUMAN - | −1.1328969 | 0.02467867 |
| | | | MBD3_HUMAN | | |
| 255 - 32 | N255 | C32 | EED_HUMAN - | −1.1331292 | 0.00827365 |
| | | | Gilbert_Lab_CRISPRi_KRAB | | |
| 61 - 241 | N61 | C241 | HAT1_HUMAN - | −1.1331982 | 0.03062288 |
| | | | SIR2_HUMAN | | |
| 196 - 233 | N196 | C233 | MTA1_HUMAN - | −1.1340928 | 0.03716628 |
| | | | HINFP_HUMAN | | |
| 306 - 34 | N306 | C34 | CobB - DNMT3A- | −1.1343713 | 0.00779404 |
| | | | 3L_JKNp112 | | |
| 306 - 175 | N306 | C175 | CobB - RUVB2_HUMAN | −1.1354303 | 0.03126122 |
| 3 - 69 | N3 | C69 | HDAC3 - SETB2_HUMAN | −1.1355944 | 0.00723298 |
| 117 - 32 | N117 | C32 | HDAC6_HUMAN - | −1.1363265 | 0.04353037 |
| | | | Gilbert_Lab_CRISPRi_KRAB | | |
| 212 - 334 | N212 | C334 | HDAC8_HUMAN - | −1.1366467 | 0.0132466 |
| | | | hs RCOR1 | | |
| 67 - 68 | N67 | C68 | PRDM9_HUMAN - | −1.1369054 | 0.01583047 |
| | | | MBD3_HUMAN | | |
| 195 - 306 | N195 | C306 | SETD3_HUMAN - CobB | −1.1372276 | 0.04166453 |
| 105 - 273 | N105 | C273 | MBD2_HUMAN - PRDM9- | −1.1401715 | 0.01451992 |
| | | | CD | | |
| 315 - 55 | N315 | C55 | NCoR - RBBP4_HUMAN | −1.1402967 | 0.0367029 |
| 171 - 349 | N171 | C349 | ASH1L_HUMAN - | −1.1418241 | 0.04533101 |
| | | | DAM_N132A | | |
| 212 - 248 | N212 | C248 | HDAC8_HUMAN - | −1.1420659 | 0.0497809 |
| | | | GLYR1_HUMAN | | |
| 69 - 306 | N69 | C306 | SETB2_HUMAN - CobB | −1.1432647 | 0.00224514 |
| 68 - 288 | N68 | C288 | MBD3_HUMAN - SUV[SET] | −1.1436134 | 0.0027344 |
| 298 - 95 | N298 | C95 | MBD2b - SETD6_HUMAN | −1.1440139 | 0.04731002 |
| 68 - 59 | N68 | C59 | MBD3_HUMAN - | −1.1444215 | 0.0051794 |
| | | | INO80_HUMAN | | |
| 250 - 68 | N250 | C68 | HCFC1_HUMAN - | −1.1445334 | 0.01581748 |
| | | | MBD3_HUMAN | | |
| 68 - 277 | N68 | C277 | MBD3_HUMAN - SUV39H1 | −1.1449319 | 0.0246287 |
| 8 - 298 | N8 | C298 | MECP2 - MBD2b | −1.1449788 | 0.01946759 |
| 88 - 215 | N88 | C215 | ING4_HUMAN - | −1.1453784 | 0.04493502 |
| | | | HDAC4_HUMAN | | |
| 313 - 152 | N313 | C152 | SaII - CDY1_HUMAN | −1.1456486 | 0.04685083 |
| 233 - 306 | N233 | C306 | HINFP_HUMAN - CobB | −1.1458054 | 0.01780628 |
| 3 - 277 | N3 | C277 | HDAC3 - SUV39H1 | −1.1458999 | 0.03576155 |
| 64 - 69 | N64 | C69 | HDAC2_HUMAN - | −1.1463461 | 0.03458111 |
| | | | SETB2_HUMAN | | |
| 290 - 298 | N290 | C298 | HP1aCS - MBD2b | −1.1470507 | 0.01432165 |
| 105 - 249 | N105 | C249 | MBD2_HUMAN - HAC1- | −1.1494202 | 0.0085069 |
| | | | HAT | | |
| 293 - 212 | N293 | C212 | KRAB-MeCP2 - | −1.1498539 | 0.04461968 |
| | | | HDAC8_HUMAN | | |
| 3 - 112 | N3 | C112 | HDAC3 - KDM5A_HUMAN | −1.1514925 | 0.04276474 |
| 222 - 105 | N222 | C105 | IN80E_HUMAN - | −1.1515105 | 0.0033915 |
| | | | MBD2_HUMAN | | |
| 105 - 26 | N105 | C26 | MBD2_HUMAN - EZH1 | −1.1522228 | 0.01022857 |
| 105 - 266 | N105 | C266 | MBD2_HUMAN - | −1.1529236 | 0.00211512 |
| | | | GADD45A | | |
| 73 - 152 | N73 | C152 | KDM5D_HUMAN - | −1.153 | 0.00840693 |
| | | | CDY1_HUMAN | | |
| 306 - 190 | N306 | C190 | CobB - ANM1_HUMAN | −1.1530614 | 0.00627117 |
| 55 - 213 | N55 | C213 | RBBP4_HUMAN - | −1.153206 | 0.02826899 |
| | | | HBAP1_HUMAN | | |
| 324 - 293 | N324 | C293 | LBR_HUMAN - KRAB- | −1.1538979 | 0.0299308 |
| | | | MeCP2 | | |
| 112 - 191 | N112 | C191 | KDM5A_HUMAN - | −1.1541945 | 0.04157354 |
| | | | CDYL_HUMAN | | |
| 344 - 280 | N344 | C280 | HDAC3_HUMAN - CBF1- | −1.1542003 | 0.04008525 |
| | | | Cterm | | |
| 306 - 95 | N306 | C95 | CobB - SETD6_HUMAN | −1.1546868 | 0.00694617 |
| 68 - 310 | N68 | C310 | MBD3_HUMAN - TgSET8 | −1.1549558 | 0.02077691 |
| 105 - 24 | N105 | C24 | MBD2_HUMAN - CTCFL | −1.1559424 | 0.0072152 |
| 105 - 345 | N105 | C345 | MBD2_HUMAN - | −1.1570526 | 0.00464171 |
| | | | MSX2_HUMAN | | |
| 14 - 32 | N14 | C32 | RELA - | −1.1584566 | 0.03588684 |
| | | | Gilbert_Lab_CRISPRi_KRAB | | |
| 298 - 271 | N298 | C271 | MBD2b - GCN5 | −1.158682 | 0.00661271 |
| 182 - 257 | N182 | C257 | MTA3_HUMAN - c-Myb- | −1.1607249 | 0.01697763 |
| | | | TAD | | |
| 130 - 298 | N130 | C298 | PRDM2_HUMAN - MBD2b | −1.1627471 | 0.00627609 |
| 287 - 105 | N287 | C105 | G9A[SET] - MBD2_HUMAN | −1.1630279 | 0.00155449 |
| 131 - 302 | N131 | C302 | PRDM2_HUMAN - HDAC11 | −1.1635788 | 0.04747865 |
| 158 - 105 | N158 | C105 | SETB1_HUMAN - | −1.1640895 | 0.04980888 |
| | | | MBD2_HUMAN | | |
| 105 - 271 | N105 | C271 | MBD2_HUMAN - GCN5 | −1.1644723 | 0.01041076 |
| 106 - 55 | N106 | C55 | KAT6B_HUMAN - | −1.1650799 | 0.01435098 |
| | | | RBBP4_HUMAN | | |
| 55 - 113 | N55 | C113 | RBBP4_HUMAN - | −1.1653266 | 0.02288629 |
| | | | KDM5A_HUMAN | | |
| 173 - 314 | N173 | C314 | SIR4_HUMAN - MeCP2 | −1.1662494 | 0.0489906 |
| 298 - 272 | N298 | C272 | MBD2b - Sir2 | −1.1664163 | 0.00539393 |
| 68 - 226 | N68 | C226 | MBD3_HUMAN - | −1.1668142 | 0.02803102 |
| | | | SETD2_HUMAN | | |
| 3 - 320 | N3 | C320 | HDAC3 - mMLL3-SET | −1.1677596 | 0.00269038 |
| 153 - 320 | N153 | C320 | KAT7_HUMAN - mMLL3- | −1.1684234 | 0.03912455 |
| | | | SET | | |
| 201 - 299 | N201 | C299 | KDM2B_HUMAN - HST2 | −1.1685123 | 0.03368301 |
| 110 - 32 | N110 | C32 | JMJD4_HUMAN - | −1.1689725 | 0.00164422 |
| | | | Gilbert_Lab_CRISPRi_KRAB | | |
| 66 - 105 | N66 | C105 | DOT1L_HUMAN - | −1.1694558 | 0.00844392 |
| | | | MBD2_HUMAN | | |
| 280 - 215 | N280 | C215 | CBF1-Cterm - | −1.1695092 | 0.00507853 |
| | | | HDAC4_HUMAN | | |
| 306 - 219 | N306 | C219 | CobB - JARD2_HUMAN | −1.1712699 | 0.00175023 |
| 334 - 8 | N334 | C8 | hs_RCOR1 - MECP2 | −1.1722383 | 0.01037453 |
| 112 - 165 | N112 | C165 | KDM5A_HUMAN - | −1.173361 | 0.02723483 |
| | | | MTA2_HUMAN | | |
| 174 - 68 | N174 | C68 | HDAC1_HUMAN - | −1.1746845 | 0.03082822 |
| | | | MBD3_HUMAN | | |
| 267 - 272 | N267 | C272 | FOXA1-Nterm - Sir2 | −1.1764656 | 0.04759792 |
| 306 - 300 | N306 | C300 | CobB - SIRT6 | −1.1772638 | 0.00561799 |
| 273 - 298 | N273 | C298 | PRDM9-CD - MBD2b | −1.1774178 | 0.03124595 |
| 149 - 7 | N149 | C7 | MBD1_HUMAN - ZNF10 | −1.177978 | 0.00726658 |
| 68 - 267 | N68 | C267 | MBD3_HUMAN - FOXA1- | −1.17816 | 0.00651457 |
| | | | Nterm | | |
| 9 - 293 | N9 | C293 | MECP2 - KRAB-MeCP2 | −1.1784267 | 0.01268893 |
| 68 - 27 | N68 | C27 | MBD3_HUMAN - EZH1 | −1.1792375 | 0.0076529 |
| 273 - 191 | N273 | C191 | PRDM9-CD - | −1.1798788 | 0.02425262 |
| | | | CDYL_HUMAN | | |
| 255 - 68 | N255 | C68 | EED_HUMAN - | −1.1799264 | 0.01738823 |
| | | | MBD3_HUMAN | | |
| 68 - 233 | N68 | C233 | MBD3_HUMAN - | −1.180471 | 0.00492287 |
| | | | HINFP_HUMAN | | |
| 202 - 290 | N202 | C290 | KDM2B_HUMAN - HP1aCS | −1.1808414 | 0.01880286 |
| 66 - 162 | N66 | C162 | DOT1L_HUMAN - | −1.1826074 | 0.02168409 |
| | | | SIR6_HUMAN | | |
| 105 - 263 | N105 | C263 | MBD2_HUMAN - HDAC8 | −1.1830346 | 0.04227082 |
| 17 - 334 | N17 | C334 | EZH2 - hs_RCOR1 | −1.1831717 | 0.00611871 |
| 25 - 147 | N25 | C147 | CTCFL - NSD3_HUMAN | −1.1843459 | 0.01682866 |
| 298 - 329 | N298 | C329 | MBD2b - pbcv1_vSET | −1.1843982 | 0.0252023 |
| 267 - 293 | N267 | C293 | FOXA1-Nterm - KRAB- | −1.185559 | 0.04396317 |
| | | | MeCP2 | | |
| 75 - 68 | N75 | C68 | KDM5D_HUMAN - | −1.1865453 | 0.0075903 |
| | | | MBD3_HUMAN | | |
| 306 - 20 | N306 | C20 | CobB - KDM1B | −1.1868919 | 0.00754871 |
| 273 - 68 | N273 | C68 | PRDM9-CD - | −1.187848 | 0.00585447 |
| | | | MBD3_HUMAN | | |
| 310 - 334 | N310 | C334 | TgSET8 - hs_RCOR1 | −1.1880287 | 0.01892282 |
| 280 - 293 | N280 | C293 | CBF1-Cterm - KRAB-MeCP2 | −1.1880902 | 0.01961471 |
| 83 - 255 | N83 | C255 | SMRD3_HUMAN - | −1.1881856 | 0.04419152 |
| | | | EED_HUMAN | | |
| 311 - 202 | N311 | C202 | Sin3a - KDM2B_HUMAN | −1.1885474 | 0.02903824 |
| 5 - 152 | N5 | C152 | KDM1A - CDY1_HUMAN | −1.1885733 | 0.01267099 |
| 25 - 334 | N25 | C334 | CTCFL - hs_RCOR1 | −1.189583 | 0.04192416 |
| 25 - 295 | N25 | C295 | CTCFL - SET-TAF1B | −1.189664 | 0.04224211 |
| 3 - 275 | N3 | C275 | HDAC3 - DOT1L- | −1.189942 | 0.01687497 |
| | | | DOT1_domain | | |
| 220 - 131 | N220 | C131 | JARD2_HUMAN - | −1.1901779 | 0.04022975 |
| | | | PRDM2_HUMAN | | |
| 106 - 68 | N106 | C68 | KAT6B_HUMAN - | −1.1901825 | 0.00257116 |
| | | | MBD3_HUMAN | | |
| 47 - 298 | N47 | C298 | ANM2_HUMAN - MBD2b | −1.1902207 | 0.03226335 |
| 68 - 150 | N68 | C150 | MBD3_HUMAN - | −1.190486 | 0.04113157 |
| | | | HDA11_HUMAN | | |
| 345 - 105 | N345 | C105 | MSX2_HUMAN - | −1.1909137 | 0.00720547 |
| | | | MBD2_HUMAN | | |
| 257 - 215 | N257 | C215 | c-Myb-TAD - | −1.1910864 | 0.03139481 |
| | | | HDAC4_HUMAN | | |
| 297 - 68 | N297 | C68 | MesoLo - MBD3_HUMAN | −1.191593 | 0.00826629 |
| 68 - 130 | N68 | C130 | MBD3_HUMAN - | −1.1920593 | 0.00730459 |
| | | | PRDM2_HUMAN | | |
| 306 - 297 | N306 | C297 | CobB - MesoLo | −1.1922855 | 0.00148208 |
| 135 - 272 | N135 | C272 | KDM2A_HUMAN - Sir2 | −1.1928632 | 0.04648234 |
| 78 - 131 | N78 | C131 | KAT6A_HUMAN - | −1.1935132 | 0.02645971 |
| | | | PRDM2_HUMAN | | |
| 105 - 123 | N105 | C123 | MBD2_HUMAN - | −1.193592 | 0.03442472 |
| | | | KMT2A_HUMAN | | |
| 205 - 55 | N205 | C55 | JMJD7_HUMAN - | −1.1942332 | 0.03144964 |
| | | | RBBP4_HUMAN | | |
| 3 - 218 | N3 | C218 | HDAC3 - IN80B_HUMAN | −1.1942826 | 0.00962538 |
| 1 - 7 | N1 | C7 | SETD1A - ZNF10 | −1.194756 | 0.04646763 |
| 293 - 315 | N293 | C315 | KRAB-MeCP2 - NCoR | −1.1950921 | 0.00544617 |
| 196 - 330 | N196 | C330 | MTA1_HUMAN - ce_Set1 | −1.1952458 | 0.01038501 |
| 298 - 255 | N298 | C255 | MBD2b - EED_HUMAN | −1.1954883 | 0.00158966 |
| 3 - 306 | N3 | C306 | HDAC3 - CobB | −1.1955032 | 0.00582815 |
| 296 - 105 | N296 | C105 | HP1a - MBD2_HUMAN | −1.1958539 | 0.00202929 |
| 12 - 341 | N12 | C341 | KMT2A - NCOR2_HUMAN | −1.1964881 | 0.02458941 |
| 130 - 68 | N130 | C68 | PRDM2_HUMAN - | −1.1974138 | 0.02254673 |
| | | | MBD3_HUMAN | | |
| 312 - 293 | N312 | C293 | SetD8 - KRAB-MeCP2 | −1.1980458 | 0.0106824 |
| 63 - 105 | N63 | C105 | SMYD5_HUMAN - | −1.1983103 | 0.01389487 |
| | | | MBD2_HUMAN | | |
| 255 - 299 | N255 | C299 | EED_HUMAN - HST2 | −1.199794 | 0.02577271 |
| 166 - 7 | N166 | C7 | EHMT1_HUMAN - ZNF10 | −1.2001654 | 0.03827989 |
| 126 - 298 | N126 | C298 | SETMR_HUMAN - MBD2b | −1.2008579 | 0.0080318 |
| 37 - 55 | N37 | C55 | KDM6A - RBBP4_HUMAN | −1.2010894 | 0.03908863 |
| 69 - 108 | N69 | C108 | SETB2_HUMAN - | −1.2021008 | 0.00893935 |
| | | | KAT6B_HUMAN | | |
| 3 - 34 | N3 | C34 | HDAC3 - DNMT3A- | −1.2023238 | 0.00392255 |
| | | | 3L_JKNp112 | | |
| 269 - 215 | N269 | C215 | PU.1 - HDAC4_HUMAN | −1.2029817 | 0.01362601 |
| 158 - 306 | N158 | C306 | SETB1_HUMAN - CobB | −1.2033338 | 0.04343765 |
| 17 - 191 | N17 | C191 | EZH2 - CDYL_HUMAN | −1.2038811 | 0.00555868 |
| 25 - 68 | N25 | C68 | CTCFL - MBD3_HUMAN | −1.2041685 | 0.00580924 |
| 68 - 251 | N68 | C251 | MBD3_HUMAN - | −1.2042853 | 0.02003576 |
| | | | HCFC1_HUMAN | | |
| 34 - 105 | N34 | C105 | DNMT3A-3L_JKNp112 - | −1.2043135 | 0.02206037 |
| | | | MBD2_HUMAN | | |
| 257 - 131 | N257 | C131 | c-Myb-TAD - | −1.2048637 | 0.00394994 |
| | | | PRDM2_HUMAN | | |
| 289 - 105 | N289 | C105 | FOG1 - MBD2_HUMAN | −1.2050654 | 0.01635753 |
| 344 - 246 | N344 | C246 | HDAC3_HUMAN - | −1.2059461 | 0.00117435 |
| | | | ATRX_HUMAN | | |
| 138 - 105 | N138 | C105 | TFPT_HUMAN - | −1.2062056 | 0.00332475 |
| | | | MBD2_HUMAN | | |
| 344 - 69 | N344 | C69 | HDAC3_HUMAN - | −1.206282 | 0.04026467 |
| | | | SETB2_HUMAN | | |
| 300 - 306 | N300 | C306 | SIRT6 - CobB | −1.2071562 | 0.00439927 |
| 105 - 27 | N105 | C27 | MBD2_HUMAN - EZH1 | −1.2074474 | 0.00122129 |
| 151 - 191 | N151 | C191 | SIR7_HUMAN - | −1.209277 | 0.02344826 |
| | | | CDYL_HUMAN | | |
| 105 - 149 | N105 | C149 | MBD2_HUMAN - | −1.209505 | 0.00540665 |
| | | | MBD1_HUMAN | | |
| 293 - 130 | N293 | C130 | KRAB-MeCP2 - | −1.2095667 | 0.02818996 |
| | | | PRDM2_HUMAN | | |
| 134 - 68 | N134 | C68 | KDM2A_HUMAN - | −1.2096081 | 0.01677297 |
| | | | MBD3_HUMAN | | |
| 189 - 191 | N189 | C191 | ING2_HUMAN - | −1.2107728 | 0.03604838 |
| | | | CDYL_HUMAN | | |
| 293 - 149 | N293 | C149 | KRAB-MeCP2 - | −1.2108382 | 0.0347253 |
| | | | MBD1_HUMAN | | |
| 68 - 120 | N68 | C120 | MBD3_HUMAN - | −1.2121826 | 0.00840935 |
| | | | RING1_HUMAN | | |
| 105 - 269 | N105 | C269 | MBD2_HUMAN - PU.1 | −1.212999 | 0.00907613 |
| 216 - 306 | N216 | C306 | ING5_HUMAN - CobB | −1.2132132 | 7.42E−04 |
| 298 - 305 | N298 | C305 | MBD2b - NUE | −1.2137614 | 0.00603407 |
| 105 - 289 | N105 | C289 | MBD2_HUMAN - FOG1 | −1.2138124 | 0.0421484 |
| 273 - 293 | N273 | C293 | PRDM9-CD - KRAB-MeCP2 | −1.2140649 | 0.01923716 |
| 5 - 68 | N5 | C68 | KDM1A - MBD3_HUMAN | −1.2140748 | 0.01904977 |
| 108 - 32 | N108 | C32 | KAT6B_HUMAN - | −1.2162406 | 0.00174654 |
| | | | Gilbert_Lab_CRISPRi_KRAB | | |
| 306 - 69 | N306 | C69 | CobB - SETB2_HUMAN | −1.2162866 | 0.0039222 |
| 269 - 55 | N269 | C55 | PU.1 - RBBP4_HUMAN | −1.2163234 | 0.02249287 |
| 306 - 314 | N306 | C314 | CobB - MeCP2 | −1.2171074 | 0.01944157 |
| 187 - 293 | N187 | C293 | MBD4_HUMAN - KRAB- | −1.217522 | 0.01803806 |
| | | | MeCP2 | | |
| 55 - 267 | N55 | C267 | RBBP4_HUMAN - FOXA1- | −1.2194119 | 0.00380561 |
| | | | Nterm | | |
| 106 - 7 | N106 | C7 | KAT6B_HUMAN - ZNF10 | −1.219444 | 0.00458683 |
| 165 - 264 | N165 | C264 | MTA2_HUMAN - | −1.2207026 | 0.0265596 |
| | | | MTL5_HUMAN | | |
| 75 -105 | N75 | C105 | KDM5D_HUMAN - | −1.2207895 | 0.00618035 |
| | | | MBD2_HUMAN | | |
| 344 - 51 | N344 | C51 | HDAC3_HUMAN - | −1.2208833 | 0.04979993 |
| | | | UCHLS_HUMAN | | |
| 306 - 309 | N306 | C309 | CobB - HDAC8 | −1.2212759 | 0.01003049 |
| 246 - 306 | N246 | C306 | ATRX_HUMAN - CobB | −1.2215584 | 0.00396427 |
| 215 - 38 | N215 | C38 | HDAC4_HUMAN - EHMT2 | −1.2222827 | 0.03549515 |
| 298 - 221 | N298 | C221 | MBD2b - SMYD2_HUMAN | −1.2236058 | 0.02054816 |
| 3 - 164 | N3 | C164 | HDAC3 - SIR5_HUMAN | −1.2252469 | 0.00249696 |
| 226 - 68 | N226 | C68 | SETD2_HUMAN - | −1.2257255 | 0.00390166 |
| | | | MBD3_HUMAN | | |
| 55 - 164 | N55 | C164 | RBBP4_HUMAN - | −1.2258207 | 0.00106263 |
| | | | SIR5_HUMAN | | |
| 182 - 45 | N182 | C45 | MTA3_HUMAN - | −1.2262605 | 0.0397372 |
| | | | KMT2D_HUMAN | | |
| 182 - 320 | N182 | C320 | MTA3_HUMAN - mMLL3- | −1.226788 | 0.00221939 |
| | | | SET | | |
| 26 - 306 | N26 | C306 | EZH1 - CobB | −1.2269183 | 0.00644796 |
| 346 - 68 | N346 | C68 | MSX2_HUMAN - | −1.2275914 | 0.01074495 |
| | | | MBD3_HUMAN | | |
| 341 - 296 | N341 | C296 | NCOR2_HUMAN - HP1a | −1.2276746 | 0.03233805 |
| 296 - 298 | N296 | C298 | HP1a - MBD2b | −1.2280604 | 0.00112753 |
| 97 - 298 | N97 | C298 | CHD3_HUMAN - MBD2b | −1.2282415 | 0.01174699 |
| 68 - 280 | N68 | C280 | MBD3_HUMAN - CBF1- | −1.2301122 | 0.01480597 |
| | | | Cterm | | |
| 55 - 334 | N55 | C334 | RBBP4_HUMAN - | −1.230145 | 0.02360917 |
| | | | hs_RCOR1 | | |
| 228 - 26 | N228 | C26 | HDAC7_HUMAN - EZH1 | −1.2304769 | 0.03364942 |
| 32 - 306 | N32 | C306 | Gilbert_Lab_CRISPRi_KRAB - | −1.2304885 | 0.01055678 |
| | | | CobB | | |
| 185 - 105 | N185 | C105 | RBBP7_HUMAN - | −1.2315946 | 0.01952822 |
| | | | MBD2_HUMAN | | |
| 202 - 105 | N202 | C105 | KDM2B_HUMAN - | −1.2317344 | 0.01018781 |
| | | | MBD2_HUMAN | | |
| 271 - 272 | N271 | C272 | GCN5 - Sir2 | −1.2320744 | 0.0173872 |
| 201 - 298 | N201 | C298 | KDM2B_HUMAN - MBD2b | −1.2320797 | 0.00870992 |
| 68 - 138 | N68 | C138 | MBD3_HUMAN - | −1.2323302 | 0.00527849 |
| | | | TFPT_HUMAN | | |
| 204 - 299 | N204 | C299 | HIF1N_HUMAN - HST2 | −1.2332619 | 0.031855 |
| 306 - 320 | N306 | C320 | CobB - mMLL3-SET | −1.2335597 | 9.40E−04 |
| 237 - 105 | N237 | C105 | KAT5_HUMAN - | −1.2339212 | 0.00265871 |
| | | | MBD2_HUMAN | | |
| 328 - 105 | N328 | C105 | hs_PHF19 - MBD2_HUMAN | −1.2345866 | 0.00298394 |
| 105 - 162 | N105 | C162 | MBD2_HUMAN - | −1.2389014 | 0.00267179 |
| | | | SIR6_HUMAN | | |
| 18 - 68 | N18 | C68 | EZH2 - MBD3_HUMAN | −1.239342 | 0.04203516 |
| 68 - 68 | N68 | C68 | MBD3_HUMAN - | −1.2394888 | 0.01204173 |
| | | | MBD3_HUMAN | | |
| 306 - 204 | N306 | C204 | CobB - HIF1N_HUMAN | −1.2397432 | 0.01259062 |
| 311 - 298 | N311 | C298 | Sin3a - MBD2b | −1.2401202 | 0.02517373 |
| 135 - 299 | N135 | C299 | KDM2A_HUMAN - HST2 | −1.2408065 | 0.04181804 |
| 212 - 68 | N212 | C68 | HDAC8_HUMAN - | −1.2418579 | 0.01786708 |
| | | | MBD3_HUMAN | | |
| 148 - 191 | N148 | C191 | NSD3_HUMAN - | −1.2419943 | 0.03833889 |
| | | | CDYL_HUMAN | | |
| 55 - 263 | N55 | C263 | RBBP4_HUMAN - HDAC8 | −1.2423145 | 0.03204441 |
| 320 - 328 | N320 | C328 | mMLL3-SET - hs_PHF19 | −1.2424058 | 0.02824765 |
| 105 - 18 | N105 | C18 | MBD2_HUMAN - EZH2 | −1.2433939 | 0.02108537 |
| 302 - 293 | N302 | C293 | HDAC11 - KRAB-MeCP2 | −1.2448775 | 0.01454248 |
| 1 - 191 | N1 | C191 | SETD1A - CDYL_HUMAN | −1.2453092 | 0.01417863 |
| 177 - 171 | N177 | C171 | KDM5C_HUMAN - | −1.2458118 | 0.03495492 |
| | | | ASH1L_HUMAN | | |
| 218 - 55 | N218 | C55 | IN80B_HUMAN - | −1.245886 | 0.01038774 |
| | | | RBBP4_HUMAN | | |
| 310 - 298 | N310 | C298 | TgSET8 - MBD2b | −1.2459458 | 0.00891549 |
| 105 - 107 | N105 | C107 | MBD2_HUMAN - | −1.2472551 | 6.20E−04 |
| | | | KAT6B_HUMAN | | |
| 245 - 32 | N245 | C32 | TYY1_HUMAN - | −1.2474757 | 0.01582482 |
| | | | Gilbert_Lab_CRISPRi_KRAB | | |
| 112 - 105 | N112 | C105 | KDM5A_HUMAN - | −1.2486112 | 4.67E−04 |
| | | | MBD2_HUMAN | | |
| 105 - 15 | N105 | C15 | MBD2_HUMAN - EP300 | −1.2488214 | 0.00282733 |
| 332 - 7 | N332 | C7 | hs_SIRT5 - ZNF10 | −1.2490729 | 0.03782275 |
| 3 - 299 | N3 | C299 | HDAC3 - HST2 | −1.2492137 | 0.02470862 |
| 253 - 32 | N253 | C32 | RBBP5_HUMAN - | −1.2499792 | 0.00834305 |
| | | | Gilbert_Lab_CRISPRi_KRAB | | |
| 136 - 105 | N136 | C105 | JMJD6_HUMAN - | −1.2502292 | 6.08E−04 |
| | | | MBD2_HUMAN | | |
| 306 - 273 | N306 | C273 | CobB - PRDM9-CD | −1.2505526 | 0.01385185 |
| 73 - 306 | N73 | C306 | KDM5D_HUMAN - CobB | −1.2507223 | 0.002031 |
| 68 - 221 | N68 | C221 | MBD3_HUMAN - | −1.2507467 | 0.0265672 |
| | | | SMYD2_HUMAN | | |
| 296 - 293 | N296 | C293 | HP1a - KRAB-MeCP2 | −1.2511653 | 0.0146328 |
| 174 - 306 | N174 | C306 | HDAC1_HUMAN - CobB | −1.2512962 | 0.04307571 |
| 42 - 293 | N42 | C293 | KMT2E_HUMAN - KRAB- | −1.2515425 | 0.02859632 |
| | | | MeCP2 | | |
| 334 - 293 | N334 | C293 | hs_RCOR1 - KRAB-MeCP2 | −1.2515709 | 0.00328435 |
| 299 - 5 | N299 | C5 | HST2 - KDM1A | −1.2521314 | 0.03644005 |
| 298 - 20 | N298 | C20 | MBD2b - KDM1B | −1.2522706 | 0.04425689 |
| 68 - 272 | N68 | C272 | MBD3_HUMAN - Sir2 | −1.2526891 | 0.00315072 |
| 105 - 87 | N105 | C87 | MBD2_HUMAN - | −1.2534152 | 0.00575384 |
| | | | SETD7_HUMAN | | |
| 329 - 334 | N329 | C334 | pbcv1_vSET - hs_RCOR1 | −1.2538074 | 0.04326601 |
| 105 - 296 | N105 | C296 | MBD2_HUMAN - HP1a | −1.2542018 | 0.0196984 |
| 3 - 100 | N3 | C100 | HDAC3 - TAF1_HUMAN | −1.2542167 | 0.01589577 |
| 341 - 271 | N341 | C271 | NCOR2_HUMAN - GCN5 | −1.2550285 | 0.04807251 |
| 165 - 330 | N165 | C330 | MTA2_HUMAN - ce_Set1 | −1.2552944 | 0.03634341 |
| 105 - 43 | N105 | C43 | MBD2_HUMAN - | −1.2562639 | 0.01304264 |
| | | | SETD4_HUMAN | | |
| 315 - 165 | N315 | C165 | NCoR - MTA2_HUMAN | −1.2567213 | 0.00512499 |
| 105 - 288 | N105 | C288 | MBD2_HUMAN - SUV[SET] | −1.2573625 | 0.04850555 |
| 212 - 131 | N212 | C131 | HDAC8_HUMAN - | −1.2576288 | 0.03242931 |
| | | | PRDM2_HUMAN | | |
| 197 - 314 | N197 | C314 | SUV91_HUMAN - MeCP2 | −1.2578936 | 0.0289431 |
| 268 - 306 | N268 | C306 | FOXA1-Cterm - CobB | −1.258186 | 0.00928236 |
| 55 - 34 | N55 | C34 | RBBP4_HUMAN - | −1.2586099 | 0.00332953 |
| | | | DNMT3A-3L_JKNp112 | | |
| 1 - 165 | N1 | C165 | SETD1A - MTA2_HUMAN | −1.2587681 | 0.02361206 |
| 306 - 43 | N306 | C43 | CobB - SETD4_HUMAN | −1.2589326 | 0.01300731 |
| 165 - 280 | N165 | C280 | MTA2_HUMAN - CBF1- | −1.259486 | 0.01477668 |
| | | | Cterm | | |
| 165 - 59 | N165 | C59 | MTA2_HUMAN - | −1.2595972 | 0.02871112 |
| | | | INO80_HUMAN | | |
| 298 - 70 | N298 | C70 | MBD2b - SETB2_HUMAN | −1.2596314 | 0.01276072 |
| 95 - 213 | N95 | C213 | SETD6_HUMAN - | −1.2605223 | 0.03010746 |
| | | | HBAP1_HUMAN | | |
| 105 - 111 | N105 | C111 | MBD2_HUMAN - | −1.261235 | 0.00556345 |
| | | | KDM5A_HUMAN | | |
| 55 - 313 | N55 | C313 | RBBP4_HUMAN - SaII | −1.261631 | 7.17E−04 |
| 190 - 105 | N190 | C105 | ANM1_HUMAN - | −1.2621063 | 0.01131789 |
| | | | MBD2_HUMAN | | |
| 3 - 127 | N3 | C127 | HDAC3 - SETMR_HUMAN | −1.2622793 | 0.00337701 |
| 105 - 344 | N105 | C344 | MBD2_HUMAN - | −1.2626101 | 0.00430186 |
| | | | HDAC3_HUMAN | | |
| 3 - 98 | N3 | C98 | HDAC3 - A4FU79_HUMAN | −1.2627924 | 0.00155766 |
| 79 - 191 | N79 | C191 | KAT6A_HUMAN - | −1.2628452 | 0.03724013 |
| | | | CDYL_HUMAN | | |
| 341 - 346 | N341 | C346 | NCOR2_HUMAN - | −1.2632024 | 0.00559746 |
| | | | MSX2_HUMAN | | |
| 165 - 298 | N165 | C298 | MTA2_HUMAN - MBD2b | −1.2632706 | 0.04190117 |
| 110 - 75 | N110 | C75 | JMJD4_HUMAN - | −1.2639866 | 0.03460628 |
| | | | KDM5D_HUMAN | | |
| 105 -260 | N105 | C260 | MBD2_HUMAN - Chd1-CD | −1.2647116 | 0.04529498 |
| 226 - 298 | N226 | C298 | SETD2_HUMAN - MBD2b | −1.2652683 | 0.03217587 |
| 55 - 275 | N55 | C275 | RBBP4_HUMAN - DOT1L- | −1.2656394 | 0.0392043 |
| | | | DOT1_domain | | |
| 3 - 107 | N3 | C107 | HDAC3 - KAT6B_HUMAN | −1.2667905 | 0.01660274 |
| 105 - 132 | N105 | C132 | MBD2_HUMAN - | −1.2681857 | 0.04509242 |
| | | | PRDM2_HUMAN | | |
| 111 - 68 | N111 | C68 | KDM5A_HUMAN - | −1.2686683 | 0.01951547 |
| | | | MBD3_HUMAN | | |
| 298 - 32 | N298 | C32 | MBD2b - | −1.2697078 | 0.01560616 |
| | | | Gilbert_Lab_CRISPRi_KRAB | | |
| 68 - 299 | N68 | C299 | MBD3_HUMAN - HST2 | −1.2699826 | 9.74E−04 |
| 68 - 164 | N68 | C164 | MBD3_HUMAN - | −1.2701674 | 0.00340881 |
| | | | SIR5_HUMAN | | |
| 306 - 189 | N306 | C189 | CobB - ING2_HUMAN | −1.2702123 | 0.00983567 |
| 55 - 289 | N55 | C289 | RBBP4_HUMAN - FOG1 | −1.2706306 | 0.00103536 |
| 313 - 241 | N313 | C241 | SaII - SIR2_HUMAN | −1.2706717 | 0.03232708 |
| 88 - 68 | N88 | C68 | ING4_HUMAN - | −1.2712167 | 9.65E−04 |
| | | | MBD3_HUMAN | | |
| 267 - 299 | N267 | C299 | FOXA1-Nterm - HST2 | −1.2720677 | 0.01825752 |
| 131 - 290 | N131 | C290 | PRDM2_HUMAN - HP1aCS | −1.2722904 | 0.02340748 |
| 47 - 105 | N47 | C105 | ANM2_HUMAN - | −1.2733446 | 0.03200674 |
| | | | MBD2_HUMAN | | |
| 3 - 324 | N3 | C324 | HDAC3 - LBR_HUMAN | −1.2737251 | 0.00177021 |
| 165 - 150 | N165 | C150 | MTA2_HUMAN - | −1.2739414 | 0.04388519 |
| | | | HDA11_HUMAN | | |
| 68 - 290 | N68 | C290 | MBD3_HUMAN - HP1aCS | −1.274449 | 0.00126717 |
| 131 - 135 | N131 | C135 | PRDM2_HUMAN - | −1.2746128 | 0.03876748 |
| | | | KDM2A_HUMAN | | |
| 226 - 32 | N226 | C32 | SETD2_HUMAN - | −1.2751918 | 0.02084131 |
| | | | Gilbert_Lab_CRISPRi_KRAB | | |
| 55 - 310 | N55 | C310 | RBBP4_HUMAN - TgSET8 | −1.2756356 | 0.02983284 |
| 222 - 306 | N222 | C306 | IN80E_HUMAN - CobB | −1.2762761 | 6.28E−04 |
| 189 - 306 | N189 | C306 | ING2_HUMAN - CobB | −1.2767206 | 0.0231859 |
| 108 - 105 | N108 | C105 | KAT6B_HUMAN - | −1.2784026 | 0.00116178 |
| | | | MBD2_HUMAN | | |
| 329 - 231 | N329 | C231 | pbcv1_vSET - | −1.2790812 | 0.03222191 |
| | | | KDM5B_HUMAN | | |
| 105 - 47 | N105 | C47 | MBD2_HUMAN - | −1.2791281 | 0.00686429 |
| | | | ANM2_HUMAN | | |
| 3 - 25 | N3 | C25 | HDAC3 - CTCFL | −1.2793688 | 0.00368417 |
| 332 - 9 | N332 | C9 | hs_SIRT5 - MECP2 | −1.2793958 | 0.02971773 |
| 55 - 333 | N55 | C333 | RBBP4_HUMAN - sc_RPD3 | −1.2801274 | 0.0169562 |
| 110 - 293 | N110 | C293 | JMJD4_HUMAN - KRAB- | −1.2810374 | 0.02345322 |
| | | | MeCP2 | | |
| 344 - 306 | N344 | C306 | HDAC3_HUMAN - CobB | −1.2817938 | 0.00994917 |
| 344 - 5 | N344 | C5 | HDAC3_HUMAN - KDM1A | −1.2818127 | 0.02933174 |
| 307 - 105 | N307 | C105 | KYP - MBD2_HUMAN | −1.2826327 | 0.00118362 |
| 327 - 9 | N327 | C9 | hs_NIPP1 - MECP2 | −1.2830803 | 0.02797928 |
| 182 - 273 | N182 | C273 | MTA3_HUMAN - PRDM9- | −1.2838056 | 0.0180128 |
| | | | CD | | |
| 185 - 298 | N185 | C298 | RBBP7_HUMAN - MBD2b | −1.2841132 | 0.00401221 |
| 3 - 346 | N3 | C346 | HDAC3 - MSX2_HUMAN | −1.2846673 | 0.00183264 |
| 120 - 105 | N120 | C105 | RING1_HUMAN - | −1.2851436 | 0.01782829 |
| | | | MBD2_HUMAN | | |
| 187 - 298 | N187 | C298 | MBD4_HUMAN - MBD2b | −1.2860175 | 0.01006653 |
| 64 - 221 | N64 | C221 | HDAC2_HUMAN - | −1.2866228 | 0.04909983 |
| | | | SMYD2_HUMAN | | |
| 120 - 32 | N120 | C32 | RING1_HUMAN - | −1.2867747 | 0.00245384 |
| | | | Gilbert_Lab_CRISPRi_KRAB | | |
| 51 - 97 | N51 | C97 | UCHL5_HUMAN - | −1.2873841 | 0.04118227 |
| | | | CHD3_HUMAN | | |
| 3 - 194 | N3 | C194 | HDAC3 - ING1_HUMAN | −1.2909422 | 0.02747323 |
| 148 - 105 | N148 | C105 | NSD3_HUMAN - | −1.2909764 | 0.00174073 |
| | | | MBD2_HUMAN | | |
| 196 - 246 | N196 | C246 | MTA1_HUMAN - | −1.2911916 | 0.00117573 |
| | | | ATRX_HUMAN | | |
| 131 - 216 | N131 | C216 | PRDM2_HUMAN - | −1.2914974 | 0.01851684 |
| | | | ING5_HUMAN | | |
| 202 - 73 | N202 | C73 | KDM2B_HUMAN - | −1.2914985 | 0.0079028 |
| | | | KDM5D_HUMAN | | |
| 302 - 105 | N302 | C105 | HDAC11 - MBD2_HUMAN | −1.2924162 | 9.43E−04 |
| 307 - 68 | N307 | C68 | KYP - MBD3_HUMAN | −1.2928288 | 0.02038705 |
| 59 - 32 | N59 | C32 | INO80_HUMAN - | −1.2937103 | 0.03677024 |
| | | | Gilbert_Lab_CRISPRi_KRAB | | |
| 68 - 165 | N68 | C165 | MBD3_HUMAN - | −1.2945457 | 0.02461479 |
| | | | MTA2_HUMAN | | |
| 182 - 315 | N182 | C315 | MTA3_HUMAN - NCoR | −1.2957782 | 0.00185704 |
| 315 - 341 | N315 | C341 | NCoR - NCOR2_HUMAN | −1.2958573 | 0.01641226 |
| 305 - 67 | N305 | C67 | NUE - PRDM9_HUMAN | −1.2959426 | 0.01193027 |
| 42 - 191 | N42 | C191 | KMT2E_HUMAN - | −1.2959953 | 0.02575776 |
| | | | CDYL_HUMAN | | |
| 87 - 32 | N87 | C32 | SETD7_HUMAN - | −1.2964482 | 0.00685437 |
| | | | Gilbert_Lab_CRISPRi_KRAB | | |
| 165 - 349 | N165 | C349 | MTA2_HUMAN - | −1.2972928 | 0.00146293 |
| | | | DAM_N132A | | |
| 295 - 32 | N295 | C32 | SET-TAF1B - | −1.2973976 | 0.0014858 |
| | | | Gilbert_Lab_CRISPRi_KRAB | | |
| 269 - 131 | N269 | C131 | PU.1 - PRDM2_HUMAN | −1.2992151 | 0.00182267 |
| 175 - 298 | N175 | C298 | RUVB2_HUMAN - MBD2b | −1.3000711 | 0.03959747 |
| 182 - 154 | N182 | C154 | MTA3_HUMAN - | −1.3004823 | 0.02127899 |
| | | | NSD2_HUMAN | | |
| 61 - 191 | N61 | C191 | HAT1_HUMAN - | −1.3010876 | 0.01941164 |
| | | | CDYL_HUMAN | | |
| 105 - 218 | N105 | C218 | MBD2_HUMAN - | −1.3012229 | 0.00182478 |
| | | | IN80B_HUMAN | | |
| 197 - 334 | N197 | C334 | SUV91_HUMAN - | −1.3012438 | 0.04194521 |
| | | | hs_RCOR1 | | |
| 165 -210 | N165 | C210 | MTA2_HUMAN - | −1.3017269 | 0.02970764 |
| | | | SIR3_HUMAN | | |
| 297 - 32 | N297 | C32 | MesoLo - | −1.3018007 | 0.02463452 |
| | | | Gilbert_Lab_CRISPRi_KRAB | | |
| 331 - 105 | N331 | C105 | mm_G9a - MBD2_HUMAN | −1.3020073 | 0.00510701 |
| 341 - 300 | N341 | C300 | NCOR2_HUMAN - SIRT6 | −1.3026291 | 0.01457083 |
| 195 - 298 | N195 | C298 | SETD3_HUMAN - MBD2b | −1.3029051 | 0.03569851 |
| 61 - 293 | N61 | C293 | HAT1_HUMAN - KRAB- | −1.3036137 | 0.02836508 |
| | | | MeCP2 | | |
| 256 - 257 | N256 | C257 | LSD1-ORF - c-Myb-TAD | −1.3037812 | 0.00796565 |
| 293 - 255 | N293 | C255 | KRAB-MeCP2 - | −1.3038579 | 0.00884744 |
| | | | EED_HUMAN | | |
| 298 - 297 | N298 | C297 | MBD2b - MesoLo | −1.3053527 | 0.01095851 |
| 298 - 50 | N298 | C50 | MBD2b - NCOA1_HUMAN | −1.3065578 | 0.03065957 |
| 182 - 334 | N182 | C334 | MTA3_HUMAN - | −1.3066042 | 0.00777007 |
| | | | hs_RCOR1 | | |
| 308 - 68 | N308 | C68 | HDT1 - MBD3_HUMAN | −1.3066883 | 0.02091254 |
| 8 - 334 | N8 | C334 | MECP2 - hs_RCOR1 | −1.3073012 | 0.04807322 |
| 245 - 215 | N245 | C215 | TYY1_HUMAN - | −1.3082651 | 0.00800201 |
| | | | HDAC4_HUMAN | | |
| 239 - 32 | N239 | C32 | KDM8_HUMAN - | −1.3104587 | 0.01701347 |
| | | | Gilbert_Lab_CRISPRi_KRAB | | |
| 331 - 201 | N331 | C201 | mm_G9a - KDM2B_HUMAN | −1.3105324 | 0.04114378 |
| 185 - 332 | N185 | C332 | RBBP7_HUMAN - hs_SIRT5 | −1.3105776 | 0.02720184 |
| 105 - 77 | N105 | C77 | MBD2_HUMAN - | −1.3108287 | 0.00125837 |
| | | | KDM5D_HUMAN | | |
| 215 - 346 | N215 | C346 | HDAC4_HUMAN - | −1.3121046 | 0.02454284 |
| | | | MSX2_HUMAN | | |
| 298 - 314 | N298 | C314 | MBD2b - MeCP2 | −1.3122596 | 0.00359052 |
| 17 - 131 | N17 | C131 | EZH2 - PRDM2_HUMAN | −1.312473 | 0.02365943 |
| 216 - 32 | N216 | C32 | ING5_HUMAN - | −1.3143587 | 0.01693839 |
| | | | Gilbert_Lab_CRISPRi_KRAB | | |
| 263 - 191 | N263 | C191 | HDAC8 - CDYL_HUMAN | −1.3151021 | 0.04419684 |
| 7 - 123 | N7 | C123 | ZNF10 - KMT2A_HUMAN | −1.315188 | 0.0229147 |
| 289 - 191 | N289 | C191 | FOG1 - CDYL_HUMAN | −1.3167432 | 0.0045072 |
| 3 - 1 | N3 | C1 | HDAC3 - SETD1A | −1.3168151 | 0.00754908 |
| 55 - 297 | N55 | C297 | RBBP4_HUMAN - MesoLo | −1.3169849 | 0.017109 |
| 68 - 198 | N68 | C198 | MBD3_HUMAN - | −1.3178023 | 0.00557427 |
| | | | JMJD8_HUMAN | | |
| 182 - 111 | N182 | C111 | MTA3_HUMAN - | −1.3179629 | 7.86E−04 |
| | | | KDM5A_HUMAN | | |
| 306 - 172 | N306 | C172 | CobB - ASH1L_HUMAN | −1.3186284 | 0.00821866 |
| 3 - 221 | N3 | C221 | HDAC3 - SMYD2_HUMAN | −1.3200234 | 0.01778023 |
| 105 - 272 | N105 | C272 | MBD2_HUMAN - Sir2 | −1.3200334 | 0.00336617 |
| 245 - 68 | N245 | C68 | TYY1_HUMAN - | −1.3204912 | 0.00206419 |
| | | | MBD3_HUMAN | | |
| 131 - 308 | N131 | C308 | PRDM2_HUMAN - HDT1 | −1.3206402 | 0.04207069 |
| 317 - 315 | N317 | C315 | HDAC3 - NCoR | −1.3208018 | 6.97E−04 |
| 298 - 326 | N298 | C326 | MBD2b - pf_Sir2A | −1.3208303 | 0.00327666 |
| 317 - 249 | N317 | C249 | HDAC3 - HAC1-HAT | −1.3212584 | 0.04482727 |
| 268 - 7 | N268 | C7 | FOXA1-Cterm - ZNF10 | −1.3213509 | 0.03007043 |
| 185 - 68 | N185 | C68 | RBBP7_HUMAN - | −1.321652 | 0.02060359 |
| | | | MBD3_HUMAN | | |
| 306 - 135 | N306 | C135 | CobB - KDM2A_HUMAN | −1.3216545 | 0.0113458 |
| 233 - 298 | N233 | C298 | HINFP_HUMAN - MBD2b | −1.3220991 | 0.01280417 |
| 105 - 135 | N105 | C135 | MBD2_HUMAN - | −1.3229215 | 0.0016407 |
| | | | KDM2A_HUMAN | | |
| 55 - 17 | N55 | C17 | RBBP4_HUMAN - EZH2 | −1.3244575 | 0.03499289 |
| 63 - 32 | N63 | C32 | SMYD5_HUMAN - | −1.3276783 | 4.59E−04 |
| | | | Gilbert_Lab_CRISPRi_KRAB | | |
| 219 - 191 | N219 | C191 | JARD2_HUMAN - | −1.3282201 | 0.03169401 |
| | | | CDYL_HUMAN | | |
| 55 - 241 | N55 | C241 | RBBP4_HUMAN - | −1.3286652 | 0.00211317 |
| | | | SIR2_HUMAN | | |
| 166 - 68 | N166 | C68 | EHMT1_HUMAN - | −1.3308428 | 0.01048376 |
| | | | MBD3_HUMAN | | |
| 91 - 105 | N91 | C105 | ANM5_HUMAN - | −1.3309922 | 0.0030836 |
| | | | MBD2_HUMAN | | |
| 32 - 293 | N32 | C293 | Gilbert_Lab_CRISPRi_KRAB - | −1.3310517 | 0.00268475 |
| | | | KRAB-MeCP2 | | |
| 3 - 110 | N3 | C110 | HDAC3 - JMJD4_HUMAN | −1.3311765 | 0.04871336 |
| 6 - 32 | N6 | C32 | KDM1A - | −1.331333 | 0.04007449 |
| | | | Gilbert_Lab_CRISPRi_KRAB | | |
| 272 - 306 | N272 | C306 | Sir2 - CobB | −1.3314335 | 0.01689697 |
| 105 - 302 | N105 | C302 | MBD2_HUMAN - HDAC11 | −1.3325723 | 0.00134318 |
| 222 - 341 | N222 | C341 | IN80E_HUMAN - | −1.3334864 | 0.04384401 |
| | | | NCOR2_HUMAN | | |
| 131 - 327 | N131 | C327 | PRDM2_HUMAN - | −1.3337444 | 0.04445744 |
| | | | hs_NIPP1 | | |
| 252 - 32 | N252 | C32 | HCFC1_HUMAN - | −1.3338692 | 0.0103823 |
| | | | Gilbert_Lab_CRISPRi_KRAB | | |
| 152 - 280 | N152 | C280 | CDY1_HUMAN - CBF1- | −1.3339884 | 0.01666105 |
| | | | Cterm | | |
| 68 - 330 | N68 | C330 | MBD3_HUMAN - ce_Set1 | −1.3357006 | 0.00836193 |
| 306 - 210 | N306 | C210 | CobB - SIR3_HUMAN | −1.3363326 | 0.03911843 |
| 5 - 105 | N5 | C105 | KDM1A - MBD2_HUMAN | −1.3375134 | 7.15E−04 |
| 239 - 191 | N239 | C191 | KDM8_HUMAN - | −1.3385342 | 0.0246406 |
| | | | CDYL_HUMAN | | |
| 68 - 334 | N68 | C334 | MBD3_HUMAN - | −1.3391011 | 0.02362537 |
| | | | hs_RCOR1 | | |
| 273 - 306 | N273 | C306 | PRDM9-CD - CobB | −1.3399371 | 0.00137256 |
| 298 - 88 | N298 | C88 | MBD2b - ING4_HUMAN | −1.3406365 | 0.02235093 |
| 68 - 8 | N68 | C8 | MBD3_HUMAN - MECP2 | −1.3408919 | 0.02036753 |
| 300 - 105 | N300 | C105 | SIRT6 - MBD2_HUMAN | −1.3409066 | 0.00635382 |
| 17 - 293 | N17 | C293 | EZH2 - KRAB-MeCP2 | −1.3413378 | 0.0066314 |
| 275 - 215 | N275 | C215 | DOT1L-DOT1_domain - | −1.3417102 | 0.00350227 |
| | | | HDAC4_HUMAN | | |
| 182 - 219 | N182 | C219 | MTA3_HUMAN - | −1.342263 | 0.01673852 |
| | | | JARD2_HUMAN | | |
| 83 - 191 | N83 | C191 | SMRD3_HUMAN - | −1.3426999 | 0.03937916 |
| | | | CDYL_HUMAN | | |
| 257 - 68 | N257 | C68 | c-Myb-TAD - | −1.343505 | 0.00342522 |
| | | | MBD3_HUMAN | | |
| 55 - 68 | N55 | C68 | RBBP4_HUMAN - | −1.3437344 | 0.00426615 |
| | | | MBD3_HUMAN | | |
| 298 - 312 | N298 | C312 | MBD2b - SetD8 | −1.3444653 | 0.00285858 |
| 164 - 333 | N164 | C333 | SIR5_HUMAN - sc_RPD3 | −1.344854 | 0.01413019 |
| 68 - 106 | N68 | C106 | MBD3_HUMAN - | −1.3455357 | 0.01354673 |
| | | | KAT6B_HUMAN | | |
| 201 - 97 | N201 | C97 | KDM2B_HUMAN - | −1.3473168 | 0.03367627 |
| | | | CHD3_HUMAN | | |
| 9 - 199 | N9 | C199 | MECP2 - ING3_HUMAN | −1.3482367 | 0.02851579 |
| 306 - 272 | N306 | C272 | CobB - Sir2 | −1.3488961 | 5.86E−04 |
| 195 - 32 | N195 | C32 | SETD3_HUMAN - | −1.3495726 | 0.00156626 |
| | | | Gilbert_Lab_CRISPRi_KRAB | | |
| 112 - 298 | N112 | C298 | KDM5A_HUMAN - MBD2b | −1.3505795 | 0.00115342 |
| 111 - 215 | N111 | C215 | KDM5A_HUMAN - | −1.3507021 | 0.02745383 |
| | | | HDAC4_HUMAN | | |
| 5 - 306 | N5 | C306 | KDM1A - CobB | −1.3507436 | 0.00122878 |
| 312 - 39 | N312 | C39 | SetD8 - KDM3A | −1.3507911 | 0.02995332 |
| 38 - 298 | N38 | C298 | EHMT2 - MBD2b | −1.3509109 | 0.02788136 |
| 12 - 165 | N12 | C165 | KMT2A - MTA2_HUMAN | −1.3512343 | 0.01803467 |
| 55 - 12 | N55 | C12 | RBBP4_HUMAN - KMT2A | −1.3514977 | 3.48E−04 |
| 305 - 100 | N305 | C100 | NUE - TAF1_HUMAN | −1.3515013 | 0.02306934 |
| 334 - 298 | N334 | C298 | hs_RCOR1 - MBD2b | −1.3526637 | 7.82E−04 |
| 182 - 280 | N182 | C280 | MTA3_HUMAN - CBF1- | −1.3530852 | 0.0022332 |
| | | | Cterm | | |
| 9 - 255 | N9 | C255 | MECP2 - EED_HUMAN | −1.3535959 | 0.01905398 |
| 55 - 123 | N55 | C123 | RBBP4_HUMAN - | −1.353605 | 0.00136962 |
| | | | KMT2A_HUMAN | | |
| 196 - 69 | N196 | C69 | MTA1_HUMAN - | −1.3545039 | 0.02451018 |
| | | | SETB2_HUMAN | | |
| 105 - 310 | N105 | C310 | MBD2_HUMAN - TgSET8 | −1.3561597 | 0.00982321 |
| 79 - 105 | N79 | C105 | KAT6A_HUMAN - | −1.3561949 | 0.02711072 |
| | | | MBD2_HUMAN | | |
| 313 - 299 | N313 | C299 | SaII - HST2 | −1.3562604 | 9.33E−04 |
| 212 - 182 | N212 | C182 | HDAC8_HUMAN - | −1.3578342 | 0.01297195 |
| | | | MTA3_HUMAN | | |
| 63 - 298 | N63 | C298 | SMYD5_HUMAN - MBD2b | −1.3579015 | 0.00112881 |
| 196 - 59 | N196 | C59 | MTA1_HUMAN - | −1.3579797 | 0.00252628 |
| | | | INO80_HUMAN | | |
| 131 - 274 | N131 | C274 | PRDM2_HUMAN - UBE2A | −1.3582757 | 0.03328771 |
| 167 - 298 | N167 | C298 | EHMT1_HUMAN - MBD2b | −1.358472 | 0.00700411 |
| 182 - 271 | N182 | C271 | MTA3_HUMAN - GCN5 | −1.3595661 | 0.00585858 |
| 173 - 306 | N173 | C306 | SIR4_HUMAN - CobB | −1.3599469 | 0.01661123 |
| 105 - 127 | N105 | C127 | MBD2_HUMAN - | −1.3606759 | 2.42E−04 |
| | | | SETMR_HUMAN | | |
| 105 - 245 | N105 | C245 | MBD2_HUMAN - | −1.3619071 | 0.01175415 |
| | | | TYY1_HUMAN | | |
| 224 - 88 | N224 | C88 | KDM4C_HUMAN - | −1.3631457 | 0.03990732 |
| | | | ING4_HUMAN | | |
| 38 - 68 | N38 | C68 | EHMT2 - MBD3_HUMAN | −1.3634306 | 0.00110349 |
| 3 - 293 | N3 | C293 | HDAC3 - KRAB-MeCP2 | −1.3641532 | 0.00450441 |
| 317 - 116 | N317 | C116 | HDAC3 - ANM6_HUMAN | −1.3646068 | 0.01494278 |
| 293 - 25 | N293 | C25 | KRAB-MeCP2 - CTCFL | −1.364707 | 0.01451064 |
| 238 - 68 | N238 | C68 | NAT10_HUMAN - | −1.3653287 | 0.03300258 |
| | | | MBD3_HUMAN | | |
| 68 - 119 | N68 | C119 | MBD3_HUMAN - | −1.3656434 | 0.0169883 |
| | | | ACL6A_HUMAN | | |
| 298 - 146 | N298 | C146 | MBD2b - KDM4A_HUMAN | −1.3665163 | 0.03752935 |
| 131 - 320 | N131 | C320 | PRDM2_HUMAN - mMLL3- | −1.3669459 | 0.01491126 |
| | | | SET | | |
| 274 - 298 | N274 | C298 | UBE2A - MBD2b | −1.3670346 | 0.00448911 |
| 55 - 63 | N55 | C63 | RBBP4_HUMAN - | −1.3677118 | 0.00266573 |
| | | | SMYD5_HUMAN | | |
| 269 - 191 | N269 | C191 | PU.1 - CDYL_HUMAN | −1.3677827 | 0.00343321 |
| 315 - 68 | N315 | C68 | NCoR - MBD3_HUMAN | −1.3684914 | 0.00163603 |
| 106 - 293 | N106 | C293 | KAT6B_HUMAN - KRAB- | −1.3695215 | 0.01390429 |
| | | | MeCP2 | | |
| 196 - 346 | N196 | C346 | MTA1_HUMAN - | −1.3700524 | 0.03721287 |
| | | | MSX2_HUMAN | | |
| 48 - 341 | N48 | C341 | SETD5_HUMAN - | −1.3700708 | 0.00918611 |
| | | | NCOR2_HUMAN | | |
| 55 - 205 | N55 | C205 | RBBP4_HUMAN - | −1.3716911 | 7.40E−04 |
| | | | JMJD7_HUMAN | | |
| 268 - 105 | N268 | C105 | FOXA1-Cterm - | −1.3717322 | 0.00489244 |
| | | | MBD2_HUMAN | | |
| 96 - 346 | N96 | C346 | CHD3_HUMAN - | −1.3723834 | 0.03052 |
| | | | MSX2_HUMAN | | |
| 182 - 326 | N182 | C326 | MTA3_HUMAN - pf_Sir2A | −1.3728426 | 0.02135749 |
| 273 - 105 | N273 | C105 | PRDM9-CD - | −1.3733871 | 4.68E−04 |
| | | | MBD2_HUMAN | | |
| 131 - 113 | N131 | C113 | PRDM2_HUMAN - | −1.3739384 | 0.03764288 |
| | | | KDM5A_HUMAN | | |
| 298 - 194 | N298 | C194 | MBD2b - ING1_HUMAN | −1.3743326 | 0.00499149 |
| 68 - 246 | N68 | C246 | MBD3_HUMAN - | −1.3772678 | 4.65E−04 |
| | | | ATRX_HUMAN | | |
| 105 - 295 | N105 | C295 | MBD2_HUMAN - SET- | −1.3772867 | 0.01934434 |
| | | | TAF1B | | |
| 251 - 105 | N251 | C105 | HCFC1_HUMAN - | −1.3778386 | 0.04614832 |
| | | | MBD2_HUMAN | | |
| 95 - 311 | N95 | C311 | SETD6_HUMAN - Sin3a | −1.3782676 | 0.02841859 |
| 123 - 306 | N123 | C306 | KMT2A_HUMAN - CobB | −1.3782911 | 0.00156919 |
| 182 - 246 | N182 | C246 | MTA3_HUMAN - | −1.3791213 | 9.82E−04 |
| | | | ATRX_HUMAN | | |
| 298 - 99 | N298 | C99 | MBD2b - IN80C_HUMAN | −1.3792899 | 0.00245886 |
| 205 - 105 | N205 | C105 | JMJD7_HUMAN - | −1.381263 | 0.02587584 |
| | | | MBD2_HUMAN | | |
| 105 - 312 | N105 | C312 | MBD2_HUMAN - SetD8 | −1.3829733 | 0.00356295 |
| 269 - 165 | N269 | C165 | PU.1 - MTA2_HUMAN | −1.3839341 | 0.0215013 |
| 308 - 120 | N308 | C120 | HDT1 - RING1_HUMAN | −1.3840744 | 0.04929503 |
| 182 - 290 | N182 | C290 | MTA3_HUMAN - HP1aCS | −1.3846703 | 0.01182624 |
| 165 - 222 | N165 | C222 | MTA2_HUMAN - | −1.385719 | 0.01151984 |
| | | | IN80E_HUMAN | | |
| 3 - 27 | N3 | C27 | HDAC3 - EZH1 | −1.3863585 | 0.00953213 |
| 73 - 191 | N73 | C191 | KDM5D_HUMAN - | −1.3868697 | 0.00618048 |
| | | | CDYL_HUMAN | | |
| 196 - 17 | N196 | C17 | MTA1_HUMAN - EZH2 | −1.3870726 | 0.00537975 |
| 228 - 307 | N228 | C307 | HDAC7_HUMAN - KYP | −1.3873418 | 0.0417872 |
| 215 - 132 | N215 | C132 | HDAC4_HUMAN - | −1.3878255 | 0.02003509 |
| | | | PRDM2_HUMAN | | |
| 79 - 32 | N79 | C32 | KAT6A_HUMAN - | −1.3884495 | 0.04229349 |
| | | | Gilbert_Lab_CRISPRi_KRAB | | |
| 295 - 68 | N295 | C68 | SET-TAF1B - | −1.3896512 | 8.12E−04 |
| | | | MBD3_HUMAN | | |
| 107 - 55 | N107 | C55 | KAT6B_HUMAN - | −1.3911344 | 0.02245624 |
| | | | RBBP4_HUMAN | | |
| 293 - 191 | N293 | C191 | KRAB-MeCP2 - | −1.3924527 | 0.02080805 |
| | | | CDYL_HUMAN | | |
| 51 - 105 | N51 | C105 | UCHL5_HUMAN - | −1.3924732 | 5.87E−04 |
| | | | MBD2_HUMAN | | |
| 25 - 306 | N25 | C306 | CTCFL - CobB | −1.3965836 | 0.0033616 |
| 21 - 105 | N21 | C105 | KDM1B - MBD2_HUMAN | −1.3975862 | 0.0011573 |
| 8 - 151 | N8 | C151 | MECP2 - SIR7_HUMAN | −1.3978009 | 0.01429118 |
| 205 - 314 | N205 | C314 | JMJD7_HUMAN - MeCP2 | −1.3978319 | 0.03019206 |
| 199 - 191 | N199 | C191 | ING3_HUMAN - | −1.397944 | 0.00858181 |
| | | | CDYL_HUMAN | | |
| 87 - 68 | N87 | C68 | SETD7_HUMAN - | −1.3982399 | 0.03137278 |
| | | | MBD3_HUMAN | | |
| 293 - 7 | N293 | C7 | KRAB-MeCP2 - ZNF10 | −1.3983398 | 0.01019261 |
| 307 - 306 | N307 | C306 | KYP - CobB | −1.4001947 | 0.01903139 |
| 288 - 300 | N288 | C300 | SUV[SET] - SIRT6 | −1.4006896 | 0.01069008 |
| 55 - 47 | N55 | C47 | RBBP4_HUMAN - | −1.4023079 | 0.02523387 |
| | | | ANM2_HUMAN | | |
| 246 - 185 | N246 | C185 | ATRX_HUMAN - | −1.4025081 | 0.00160955 |
| | | | RBBP7_HUMAN | | |
| 55 - 249 | N55 | C249 | RBBP4_HUMAN - HAC1- | −1.4032442 | 0.02283769 |
| | | | HAT | | |
| 88 - 32 | N88 | C32 | ING4_HUMAN - | −1.4038739 | 0.01261637 |
| | | | Gilbert_Lab_CRISPRi_KRAB | | |
| 55 - 38 | N55 | C38 | RBBP4_HUMAN - EHMT2 | −1.4041085 | 0.01717707 |
| 228 - 233 | N228 | C233 | HDAC7_HUMAN - | −1.4045776 | 0.03242074 |
| | | | HINFP_HUMAN | | |
| 105 - 194 | N105 | C194 | MBD2_HUMAN - | −1.4059725 | 0.00225214 |
| | | | ING1_HUMAN | | |
| 298 - 287 | N298 | C287 | MBD2b - G9A[SET] | −1.406292 | 0.04405819 |
| 269 - 293 | N269 | C293 | PU.1 - KRAB-MeCP2 | −1.4074166 | 8.78E−04 |
| 68 - 345 | N68 | C345 | MBD3_HUMAN - | −1.4077955 | 0.01765396 |
| | | | MSX2_HUMAN | | |
| 298 - 197 | N298 | C197 | MBD2b - SUV91_HUMAN | −1.409479 | 0.02454339 |
| 182 - 8 | N182 | C8 | MTA3_HUMAN - MECP2 | −1.4096088 | 0.00234131 |
| 334 - 245 | N334 | C245 | hs_RCOR1 - TYY1_HUMAN | −1.4100576 | 0.01521445 |
| 226 - 334 | N226 | C334 | SETD2_HUMAN - | −1.4108762 | 0.00226276 |
| | | | hs_RCOR1 | | |
| 320 - 165 | N320 | C165 | mMLL3-SET - | −1.4123898 | 0.00879912 |
| | | | MTA2_HUMAN | | |
| 69 - 68 | N69 | C68 | SETB2_HUMAN - | −1.4133136 | 0.00161702 |
| | | | MBD3_HUMAN | | |
| 135 - 88 | N135 | C88 | KDM2A_HUMAN - | −1.4138913 | 0.04264226 |
| | | | ING4_HUMAN | | |
| 75 - 296 | N75 | C296 | KDM5D_HUMAN - HP1a | −1.4139215 | 0.03992301 |
| 105 - 73 | N105 | C73 | MBD2_HUMAN - | −1.4150021 | 0.00265572 |
| | | | KDM5D_HUMAN | | |
| 190 - 293 | N190 | C293 | ANM1_HUMAN - KRAB- | −1.4160756 | 0.03092579 |
| | | | MeCP2 | | |
| 3 - 313 | N3 | C313 | HDAC3 - SaII | −1.4168441 | 2.06E−04 |
| 317 - 164 | N317 | C164 | HDAC3 - SIR5_HUMAN | −1.4171184 | 0.00293925 |
| 162 - 32 | N162 | C32 | SIR6_HUMAN - | −1.4172587 | 3.71E−04 |
| | | | Gilbert_Lab_CRISPRi_KRAB | | |
| 277 - 306 | N277 | C306 | SUV39H1 - CobB | −1.4176025 | 0.01013477 |
| 149 - 68 | N149 | C68 | MBD1_HUMAN - | −1.4188597 | 0.00150054 |
| | | | MBD3_HUMAN | | |
| 344 - 118 | N344 | C118 | HDAC3_HUMAN - | −1.4189561 | 0.00759233 |
| | | | HDAC6_HUMAN | | |
| 331 - 298 | N331 | C298 | mm_G9a - MBD2b | −1.4193108 | 0.00114906 |
| 190 - 68 | N190 | C68 | ANM1_HUMAN - | −1.4205395 | 0.00312 |
| | | | MBD3_HUMAN | | |
| 68 - 154 | N68 | C154 | MBD3_HUMAN - | −1.4209156 | 0.00183073 |
| | | | NSD2_HUMAN | | |
| 302 - 202 | N302 | C202 | HDAC11 - | −1.4211179 | 0.04809194 |
| | | | KDM2B_HUMAN | | |
| 306 - 202 | N306 | C202 | CobB - KDM2B_HUMAN | −1.4212073 | 0.02991387 |
| 165 - 34 | N165 | C34 | MTA2_HUMAN - DNMT3A- | −1.4222437 | 0.00204577 |
| | | | 3L_JKNp112 | | |
| 77 - 202 | N77 | C202 | KDM5D_HUMAN - | −1.4243498 | 0.01297585 |
| | | | KDM2B_HUMAN | | |
| 38 - 165 | N38 | C165 | EHMT2 - MTA2_HUMAN | −1.4244697 | 0.02569778 |
| 298 - 91 | N298 | C91 | MBD2b - ANM5_HUMAN | −1.4253045 | 0.01043129 |
| 196 - 294 | N196 | C294 | MTA1_HUMAN - DIM5 | −1.4260538 | 0.02560031 |
| 182 - 269 | N182 | C269 | MTA3_HUMAN - PU.1 | −1.4262308 | 0.00114861 |
| 266 - 306 | N266 | C306 | GADD45A - CobB | −1.4262318 | 7.02E−04 |
| 306 - 9 | N306 | C9 | CobB - MECP2 | −1.4262574 | 9.12E−04 |
| 215 - 78 | N215 | C78 | HDAC4_HUMAN - | −1.4264047 | 0.02638801 |
| | | | KAT6A_HUMAN | | |
| 177 - 191 | N177 | C191 | KDM5C_HUMAN - | −1.4267987 | 0.01782111 |
| | | | CDYL_HUMAN | | |
| 327 - 55 | N327 | C55 | hs_NIPP1 - RBBP4_HUMAN | −1.4271433 | 0.00905923 |
| 105 - 133 | N105 | C133 | MBD2_HUMAN - | −1.4286408 | 0.00598968 |
| | | | KAT8_HUMAN | | |
| 17 - 105 | N17 | C105 | EZH2 - MBD2_HUMAN | −1.4287016 | 1.86E−04 |
| 317 - 332 | N317 | C332 | HDAC3 - hs_SIRT5 | −1.4289979 | 0.00215717 |
| 5 - 293 | N5 | C293 | KDM1A - KRAB-MeCP2 | −1.4290654 | 0.01849954 |
| 68 - 116 | N68 | C116 | MBD3_HUMAN - | −1.4294221 | 0.00941555 |
| | | | ANM6_HUMAN | | |
| 105 - 20 | N105 | C20 | MBD2_HUMAN - KDM1B | −1.4297648 | 8.10E−04 |
| 55 - 345 | N55 | C345 | RBBP4_HUMAN - | −1.4303146 | 0.00208989 |
| | | | MSX2_HUMAN | | |
| 197 - 105 | N197 | C105 | SUV91_HUMAN - | −1.4305329 | 0.00185559 |
| | | | MBD2_HUMAN | | |
| 165 - 20 | N165 | C20 | MTA2_HUMAN - KDM1B | −1.4305818 | 0.03953392 |
| 3 - 335 | N3 | C335 | HDAC3 - at_SUVR4 | −1.4311037 | 0.00410836 |
| 105 - 183 | N105 | C183 | MBD2_HUMAN - | −1.4324937 | 0.00477301 |
| | | | KMT2C_HUMAN | | |
| 317 - 32 | N317 | C32 | HDAC3 - | −1.4333993 | 0.00223512 |
| | | | Gilbert_Lab_CRISPRi_KRAB | | |
| 113 - 105 | N113 | C105 | KDM5A_HUMAN - | −1.4349031 | 0.00150761 |
| | | | MBD2_HUMAN | | |
| 165 - 305 | N165 | C305 | MTA2_HUMAN - NUE | −1.4349901 | 0.01029066 |
| 341 -66 | N341 | C66 | NCOR2_HUMAN - | −1.4356236 | 0.03575713 |
| | | | DOT1L_HUMAN | | |
| 182 - 229 | N182 | C229 | MTA3_HUMAN - | −1.4357424 | 0.00442021 |
| | | | NFRKB_HUMAN | | |
| 186 - 32 | N186 | C32 | RIOX2_HUMAN - | −1.4379468 | 4.46E−04 |
| | | | Gilbert_Lab_CRISPRi_KRAB | | |
| 182 - 68 | N182 | C68 | MTA3_HUMAN - | −1.4385345 | 0.00142525 |
| | | | MBD3_HUMAN | | |
| 68 - 45 | N68 | C45 | MBD3_HUMAN - | −1.4387473 | 0.01320901 |
| | | | KMT2D_HUMAN | | |
| 105 - 34 | N105 | C34 | MBD2_HUMAN - DNMT3A- | −1.4394557 | 0.00100189 |
| | | | 3L_JKNp112 | | |
| 274 - 191 | N274 | C191 | UBE2A - CDYL_HUMAN | −1.4405006 | 0.03682924 |
| 32 - 191 | N32 | C191 | Gilbert_Lab_CRISPRi_KRAB - | −1.4406911 | 0.00134765 |
| | | | CDYL_HUMAN | | |
| 346 - 165 | N346 | C165 | MSX2_HUMAN - | −1.440715 | 0.00146134 |
| | | | MTA2_HUMAN | | |
| 162 - 298 | N162 | C298 | SIR6_HUMAN - MBD2b | −1.4412342 | 0.00130463 |
| 105 - 294 | N105 | C294 | MBD2_HUMAN - DIM5 | −1.4413015 | 7.14E−05 |
| 228 - 312 | N228 | C312 | HDAC7_HUMAN - SetD8 | −1.4419809 | 0.02908662 |
| 116 - 105 | N116 | C105 | ANM6_HUMAN - | −1.4426095 | 0.00132878 |
| | | | MBD2_HUMAN | | |
| 105 - 56 | N105 | C56 | MBD2_HUMAN - | −1.4428277 | 0.00127318 |
| | | | SUV92_HUMAN | | |
| 131 - 314 | N131 | C314 | PRDM2_HUMAN - MeCP2 | −1.443305 | 7.95E−04 |
| 105 - 116 | N105 | C116 | MBD2_HUMAN - | −1.4436162 | 0.0016288 |
| | | | ANM6_HUMAN | | |
| 216 - 298 | N216 | C298 | ING5_HUMAN - MBD2b | −1.4439951 | 5.87E−04 |
| 24 - 173 | N24 | C173 | CTCFL - SIR4_HUMAN | −1.444201 | 0.03511658 |
| 133 - 186 | N133 | C186 | KAT8_HUMAN - | −1.4455098 | 0.04419971 |
| | | | RIOX2_HUMAN | | |
| 334 - 215 | N334 | C215 | hs_RCOR1 - | −1.445781 | 0.03181152 |
| | | | HDAC4_HUMAN | | |
| 135 - 298 | N135 | C298 | KDM2A_HUMAN - MBD2b | −1.4462135 | 0.00914657 |
| 182 - 63 | N182 | C63 | MTA3_HUMAN - | −1.4465996 | 0.00198451 |
| | | | SMYD5_HUMAN | | |
| 23 - 274 | N23 | C274 | TET1 - UBE2A | −1.4468555 | 0.03010238 |
| 69 - 55 | N69 | C55 | SETB2_HUMAN - | −1.4479524 | 0.02300465 |
| | | | RBBP4_HUMAN | | |
| 23 - 105 | N23 | C105 | TET1 - MBD2_HUMAN | −1.4484156 | 0.02386389 |
| 67 - 191 | N67 | C191 | PRDM9_HUMAN - | −1.4490016 | 0.03889068 |
| | | | CDYL_HUMAN | | |
| 3 - 173 | N3 | C173 | HDAC3 - SIR4_HUMAN | −1.4491913 | 0.00540295 |
| 215 - 216 | N215 | C216 | HDAC4_HUMAN - | −1.4494013 | 0.00776304 |
| | | | ING5_HUMAN | | |
| 173 - 293 | N173 | C293 | SIR4_HUMAN - KRAB- | −1.4502824 | 0.00657288 |
| | | | MeCP2 | | |
| 298 - 113 | N298 | C113 | MBD2b - KDM5A_HUMAN | −1.4512518 | 0.00701482 |
| 162 - 293 | N162 | C293 | SIR6_HUMAN - KRAB- | −1.4512975 | 0.00698116 |
| | | | MeCP2 | | |
| 18 - 32 | N18 | C32 | EZH2 - | −1.4521011 | 0.00349301 |
| | | | Gilbert_Lab_CRISPRi_KRAB | | |
| 215 - 5 | N215 | C5 | HDAC4_HUMAN - KDM1A | −1.452489 | 0.04285392 |
| 344 - 55 | N344 | C55 | HDAC3_HUMAN - | −1.4525222 | 0.00543402 |
| | | | RBBP4_HUMAN | | |
| 215 - 56 | N215 | C56 | HDAC4_HUMAN - | −1.4537966 | 0.00345827 |
| | | | SUV92_HUMAN | | |
| 275 - 32 | N275 | C32 | DOT1L-DOT1_domain - | −1.4543743 | 9.16E−04 |
| | | | Gilbert_Lab_CRISPRi_KRAB | | |
| 128 - 233 | N128 | C233 | HAIR_HUMAN - | −1.4543819 | 0.04659986 |
| | | | HINFP_HUMAN | | |
| 55 - 67 | N55 | C67 | RBBP4_HUMAN - | −1.454538 | 0.0218015 |
| | | | PRDM9_HUMAN | | |
| 254 - 298 | N254 | C298 | MEN1_HUMAN - MBD2b | −1.4552431 | 0.02409466 |
| 77 - 105 | N77 | C105 | KDM5D_HUMAN - | −1.4553391 | 0.00301553 |
| | | | MBD2_HUMAN | | |
| 131 - 315 | N131 | C315 | PRDM2_HUMAN - NCoR | −1.4565835 | 0.03943505 |
| 108 - 255 | N108 | C255 | KAT6B_HUMAN - | −1.4567426 | 0.01668762 |
| | | | EED_HUMAN | | |
| 298 - 153 | N298 | C153 | MBD2b - KAT7_HUMAN | −1.4573176 | 0.02560699 |
| 151 - 306 | N151 | C306 | SIR7_HUMAN - CobB | −1.4577044 | 9.51E−04 |
| 315 - 131 | N315 | C131 | NCoR - PRDM2_HUMAN | −1.4579224 | 0.00912985 |
| 299 - 55 | N299 | C55 | HST2 - RBBP4_HUMAN | −1.4581027 | 0.04769023 |
| 308 - 105 | N308 | C105 | HDT1 - MBD2_HUMAN | −1.4585609 | 0.00135941 |
| 187 - 326 | N187 | C326 | MBD4_HUMAN - pf_Sir2A | −1.4598577 | 0.02410887 |
| 106 - 105 | N106 | C105 | KAT6B_HUMAN - | −1.4606753 | 4.42E−05 |
| | | | MBD2_HUMAN | | |
| 309 - 218 | N309 | C218 | HDAC8 - IN80B_HUMAN | −1.4609366 | 0.01212608 |
| 24 - 105 | N24 | C105 | CTCFL - MBD2_HUMAN | −1.4612117 | 3.51E−05 |
| 154 - 32 | N154 | C32 | NSD2_HUMAN - | −1.4634844 | 0.01540003 |
| | | | Gilbert_Lab_CRISPRi_KRAB | | |
| 220 - 299 | N220 | C299 | JARD2_HUMAN - HST2 | −1.4649816 | 0.00264047 |
| 237 - 298 | N237 | C298 | KAT5_HUMAN - MBD2b | −1.4653375 | 7.55E−04 |
| 306 - 136 | N306 | C136 | CobB - JMJD6_HUMAN | −1.4660728 | 0.01426655 |
| 24 - 271 | N24 | C271 | CTCFL - GCN5 | −1.4675154 | 0.00270947 |
| 298 - 56 | N298 | C56 | MBD2b - SUV92_HUMAN | −1.4675384 | 0.00900826 |
| 277 - 298 | N277 | C298 | SUV39H1 - MBD2b | −1.4677964 | 0.00228094 |
| 315 - 334 | N315 | C334 | NCoR - hs_RCOR1 | −1.4680421 | 0.00401285 |
| 87 - 95 | N87 | C95 | SETD7_HUMAN - | −1.4681076 | 0.03539549 |
| | | | SETD6_HUMAN | | |
| 165 - 56 | N165 | C56 | MTA2_HUMAN - | −1.4685293 | 0.04383368 |
| | | | SUV92_HUMAN | | |
| 299 - 248 | N299 | C248 | HST2 - GLYR1_HUMAN | −1.469764 | 0.01562272 |
| 105 - 99 | N105 | C99 | MBD2_HUMAN - | −1.4722582 | 0.00318641 |
| | | | IN80C_HUMAN | | |
| 136 - 191 | N136 | C191 | JMJD6_HUMAN - | −1.4733811 | 0.0017388 |
| | | | CDYL_HUMAN | | |
| 300 - 293 | N300 | C293 | SIRT6 - KRAB-MeCP2 | −1.4739969 | 0.00234045 |
| 182 - 136 | N182 | C136 | MTA3_HUMAN - | −1.474101 | 0.02509433 |
| | | | JMJD6_HUMAN | | |
| 105 - 300 | N105 | C300 | MBD2_HUMAN - SIRT6 | −1.4769381 | 6.87E−05 |
| 299 - 47 | N299 | C47 | HST2 - ANM2_HUMAN | −1.4773963 | 0.02632064 |
| 174 - 214 | N174 | C214 | HDAC1_HUMAN - | −1.4774319 | 0.03431556 |
| | | | HDAC4_HUMAN | | |
| 105 - 94 | N105 | C94 | MBD2_HUMAN - | −1.4780368 | 0.00483805 |
| | | | KDM3B_HUMAN | | |
| 165 - 274 | N165 | C274 | MTA2_HUMAN - UBE2A | −1.4787689 | 9.77E−04 |
| 314 - 107 | N314 | C107 | MeCP2 - KAT6B_HUMAN | −1.478942 | 0.04174119 |
| 105 - 314 | N105 | C314 | MBD2_HUMAN - MeCP2 | −1.4794314 | 0.00402375 |
| 162 - 68 | N162 | C68 | SIR6_HUMAN - | −1.4805386 | 0.00235818 |
| | | | MBD3_HUMAN | | |
| 85 - 32 | N85 | C32 | SMYD3_HUMAN - | −1.4807117 | 0.00227969 |
| | | | Gilbert_Lab_CRISPRi_KRAB | | |
| 222 - 215 | N222 | C215 | IN80E_HUMAN - | −1.4808689 | 0.0218761 |
| | | | HDAC4_HUMAN | | |
| 123 - 191 | N123 | C191 | KMT2A_HUMAN - | −1.4810782 | 0.00186587 |
| | | | CDYL_HUMAN | | |
| 105 - 215 | N105 | C215 | MBD2_HUMAN - | −1.4811986 | 0.01420648 |
| | | | HDAC4_HUMAN | | |
| 275 - 105 | N275 | C105 | DOT1L-DOT1_domain - | −1.4818684 | 7.74E−05 |
| | | | MBD2_HUMAN | | |
| 345 - 32 | N345 | C32 | MSX2_HUMAN - | −1.4819849 | 0.02664506 |
| | | | Gilbert_Lab_CRISPRi_KRAB | | |
| 310 - 182 | N310 | C182 | TgSET8 - MTA3_HUMAN | −1.4832045 | 0.03282199 |
| 38 - 105 | N38 | C105 | EHMT2 - MBD2_HUMAN | −1.4836232 | 8.34E−05 |
| 182 - 69 | N182 | C69 | MTA3_HUMAN - | −1.4862279 | 0.01275282 |
| | | | SETB2_HUMAN | | |
| 3 - 87 | N3 | C87 | HDAC3 - SETD7_HUMAN | −1.4873203 | 0.00440884 |
| 329 - 298 | N329 | C298 | pbcv1_vSET - MBD2b | −1.4877335 | 1.95E−04 |
| 3 - 198 | N3 | C198 | HDAC3 - JMJD8_HUMAN | −1.4890973 | 0.00951466 |
| 268 - 334 | N268 | C334 | FOXA1-Cterm - hs_RCOR1 | −1.4891229 | 0.0015488 |
| 100 - 32 | N100 | C32 | TAF1_HUMAN - | −1.48923 | 0.00603353 |
| | | | Gilbert_Lab_CRISPRi_KRAB | | |
| 188 - 334 | N188 | C334 | SMYD4_HUMAN - | −1.4893079 | 0.0191203 |
| | | | hs_RCOR1 | | |
| 151 -32 | N151 | C32 | SIR7_HUMAN - | −1.4917631 | 0.0059674 |
| | | | Gilbert_Lab_CRISPRi_KRAB | | |
| 307 - 196 | N307 | C196 | KYP - MTA1_HUMAN | −1.4928924 | 0.03919388 |
| 143 - 32 | N143 | C32 | KDM4B_HUMAN - | −1.4929837 | 0.01397837 |
| | | | Gilbert_Lab_CRISPRi_KRAB | | |
| 105 - 308 | N105 | C308 | MBD2_HUMAN - HDT1 | −1.4934079 | 0.00237223 |
| 130 - 322 | N130 | C322 | PRDM2_HUMAN - | −1.4938397 | 0.04851983 |
| | | | MINT_HUMAN | | |
| 317 - 289 | N317 | C289 | HDAC3 - FOG1 | −1.4939297 | 0.00532047 |
| 55 - 165 | N55 | C165 | RBBP4_HUMAN - | −1.4940788 | 0.03670672 |
| | | | MTA2_HUMAN | | |
| 324 - 215 | N324 | C215 | LBR_HUMAN - | −1.4941931 | 0.00181654 |
| | | | HDAC4_HUMAN | | |
| 128 - 315 | N128 | C315 | HAIR_HUMAN - NCoR | −1.4976623 | 0.02452855 |
| 267 - 298 | N267 | C298 | FOXA1-Nterm - MBD2b | −1.497724 | 6.35E−04 |
| 25 - 256 | N25 | C256 | CTCFL - LSD1-ORF | −1.4977886 | 0.04410713 |
| 272 - 127 | N272 | C127 | Sir2 - SETMR_HUMAN | −1.499124 | 0.03293159 |
| 105 - 270 | N105 | C270 | MBD2_HUMAN - ENL | −1.4997702 | 0.00222759 |
| 317 - 246 | N317 | C246 | HDAC3 - ATRX_HUMAN | −1.500439 | 2.58E−04 |
| 293 - 241 | N293 | C241 | KRAB-MeCP2 - | −1.5008154 | 0.00586427 |
| | | | SIR2_HUMAN | | |
| 88 - 298 | N88 | C298 | ING4_HUMAN - MBD2b | −1.500952 | 0.00174573 |
| 3 - 55 | N3 | C55 | HDAC3 - RBBP4_HUMAN | −1.5015892 | 0.02642142 |
| 3 - 204 | N3 | C204 | HDAC3 - HIF1N_HUMAN | −1.5020639 | 0.00434244 |
| 105 - 280 | N105 | C280 | MBD2_HUMAN - CBF1- | −1.5024696 | 0.00326985 |
| | | | Cterm | | |
| 146 - 105 | N146 | C105 | KDM4A_HUMAN - | −1.5030222 | 0.0078225 |
| | | | MBD2_HUMAN | | |
| 341 - 246 | N341 | C246 | NCOR2_HUMAN - | −1.505154 | 0.01543445 |
| | | | ATRX_HUMAN | | |
| 131 - 73 | N131 | C73 | PRDM2_HUMAN - | −1.5058032 | 4.38E−04 |
| | | | KDM5D_HUMAN | | |
| 217 - 191 | N217 | C191 | CHRC1_HUMAN - | −1.5068201 | 0.0266692 |
| | | | CDYL_HUMAN | | |
| 215 - 12 | N215 | C12 | HDAC4_HUMAN - KMT2A | −1.5081641 | 0.00312664 |
| 123 - 105 | N123 | C105 | KMT2A_HUMAN - | −1.5084745 | 3.49E−04 |
| | | | MBD2_HUMAN | | |
| 222 - 191 | N222 | C191 | IN80E_HUMAN - | −1.5091046 | 0.0044341 |
| | | | CDYL_HUMAN | | |
| 3 - 97 | N3 | C97 | HDAC3 - CHD3_HUMAN | −1.5091102 | 0.00854381 |
| 68 - 5 | N68 | C5 | MBD3_HUMAN - KDM1A | −1.5100915 | 0.01513469 |
| 111 - 293 | N111 | C293 | KDM5A_HUMAN - KRAB- | −1.5110471 | 0.01293786 |
| | | | MeCP2 | | |
| 69 - 202 | N69 | C202 | SETB2_HUMAN - | −1.5115875 | 0.01173844 |
| | | | KDM2B_HUMAN | | |
| 105 - 163 | N105 | C163 | MBD2_HUMAN - | −1.5118376 | 0.0026488 |
| | | | ANM7_HUMAN | | |
| 205 - 333 | N205 | C333 | JMJD7_HUMAN - sc_RPD3 | −1.5119511 | 0.02040196 |
| 328 - 298 | N328 | C298 | hs_PHF19 - MBD2b | −1.5119801 | 0.00876459 |
| 226 - 105 | N226 | C105 | SETD2_HUMAN - | −1.5120441 | 0.00405239 |
| | | | MBD2_HUMAN | | |
| 175 - 218 | N175 | C218 | RUVB2_HUMAN - | −1.512397 | 0.03251661 |
| | | | IN80B_HUMAN | | |
| 105 - 85 | N105 | C85 | MBD2_HUMAN - | −1.5124577 | 7.59E−04 |
| | | | SMYD3_HUMAN | | |
| 130 - 97 | N130 | C97 | PRDM2_HUMAN - | −1.5126052 | 0.01956861 |
| | | | CHD3_HUMAN | | |
| 55 - 106 | N55 | C106 | RBBP4_HUMAN - | −1.513927 | 2.65E−04 |
| | | | KAT6B_HUMAN | | |
| 293 - 108 | N293 | C108 | KRAB-MeCP2 - | −1.514382 | 0.04587446 |
| | | | KAT6B_HUMAN | | |
| 131 - 294 | N131 | C294 | PRDM2_HUMAN - DIM5 | −1.5146486 | 0.0353811 |
| 298 - 75 | N298 | C75 | MBD2b - KDM5D_HUMAN | −1.5149728 | 0.00464009 |
| 129 - 105 | N129 | C105 | HAIR_HUMAN - | −1.5155539 | 0.00249576 |
| | | | MBD2_HUMAN | | |
| 105 - 303 | N105 | C303 | MBD2_HUMAN - EZH2 | −1.5158002 | 0.0136604 |
| 213 - 190 | N213 | C190 | HBAP1_HUMAN - | −1.515822 | 0.03074989 |
| | | | ANM1_HUMAN | | |
| 201 - 293 | N201 | C293 | KDM2B_HUMAN - KRAB- | −1.5164452 | 0.01958011 |
| | | | MeCP2 | | |
| 241 - 334 | N241 | C334 | SIR2_HUMAN - hs_RCOR1 | −1.5167025 | 0.02683367 |
| 202 - 289 | N202 | C289 | KDM2B_HUMAN - FOG1 | −1.5174989 | 0.01000875 |
| 3 - 332 | N3 | C332 | HDAC3 - hs_SIRT5 | −1.5193879 | 1.80E−04 |
| 298 - 328 | N298 | C328 | MBD2b - hs_PHF19 | −1.5197249 | 0.00384227 |
| 256 - 269 | N256 | C269 | LSD1-ORF - PU.1 | −1.5199914 | 0.01208931 |
| 306 - 303 | N306 | C303 | CobB - EZH2 | −1.5215049 | 0.00466464 |
| 144 - 298 | N144 | C298 | UTY_HUMAN - MBD2b | −1.5217196 | 0.02084244 |
| 200 - 32 | N200 | C32 | ARP5_HUMAN - | −1.5221757 | 0.01320819 |
| | | | Gilbert_Lab_CRISPRi_KRAB | | |
| 55 - 8 | N55 | C8 | RBBP4_HUMAN - MECP2 | −1.5222608 | 2.13E−04 |
| 105 - 155 | N105 | C155 | MBD2_HUMAN - | −1.522908 | 4.01E−04 |
| | | | NSD2_HUMAN | | |
| 105 -210 | N105 | C210 | MBD2_HUMAN - | −1.5233208 | 0.01806123 |
| | | | SIR3_HUMAN | | |
| 105 - 45 | N105 | C45 | MBD2_HUMAN - | −1.5241247 | 2.36E−04 |
| | | | KMT2D_HUMAN | | |
| 108 - 8 | N108 | C8 | KAT6B_HUMAN - MECP2 | −1.5255338 | 0.02258125 |
| 105 - 167 | N105 | C167 | MBD2_HUMAN - | −1.5257214 | 0.02429358 |
| | | | EHMT1_HUMAN | | |
| 344 - 332 | N344 | C332 | HDAC3_HUMAN - | −1.5270354 | 0.00433238 |
| | | | hs_SIRT5 | | |
| 197 - 293 | N197 | C293 | SUV91_HUMAN - KRAB- | −1.52713 | 0.03098591 |
| | | | MeCP2 | | |
| 66 - 298 | N66 | C298 | DOT1L_HUMAN - MBD2b | −1.5271699 | 3.71E−04 |
| 306 - 151 | N306 | C151 | CobB - SIR7_HUMAN | −1.5273948 | 0.00886292 |
| 306 - 7 | N306 | C7 | CobB - ZNF10 | −1.5278554 | 1.19E−04 |
| 55 - 77 | N55 | C77 | RBBP4_HUMAN - | −1.5287575 | 0.00235358 |
| | | | KDM5D_HUMAN | | |
| 164 - 105 | N164 | C105 | SIR5_HUMAN - | −1.5290389 | 2.14E−04 |
| | | | MBD2_HUMAN | | |
| 3 - 345 | N3 | C345 | HDAC3 - MSX2_HUMAN | −1.5305986 | 0.00141218 |
| 165 - 132 | N165 | C132 | MTA2_HUMAN - | −1.5315359 | 0.02624577 |
| | | | PRDM2_HUMAN | | |
| 298 - 198 | N298 | C198 | MBD2b - JMJD8_HUMAN | −1.5322569 | 0.04758382 |
| 215 - 344 | N215 | C344 | HDAC4_HUMAN - | −1.5323864 | 0.01365395 |
| | | | HDAC3_HUMAN | | |
| 105 - 92 | N105 | C92 | MBD2_HUMAN - | −1.5327174 | 0.00304728 |
| | | | SMYD1_HUMAN | | |
| 68 - 315 | N68 | C315 | MBD3_HUMAN - NCoR | −1.5333766 | 4.06E−04 |
| 182 - 105 | N182 | C105 | MTA3_HUMAN - | −1.5344677 | 2.83E−04 |
| | | | MBD2_HUMAN | | |
| 182 - 164 | N182 | C164 | MTA3_HUMAN - | −1.5359855 | 0.00104904 |
| | | | SIR5_HUMAN | | |
| 3 - 233 | N3 | C233 | HDAC3 - HINFP_HUMAN | −1.5386376 | 6.39E−05 |
| 87 - 105 | N87 | C105 | SETD7_HUMAN - | −1.5393979 | 0.01356 |
| | | | MBD2_HUMAN | | |
| 25 - 215 | N25 | C215 | CTCFL - HDAC4_HUMAN | −1.54068 | 0.00116367 |
| 32 - 215 | N32 | C215 | Gilbert_Lab_CRISPRi_KRAB - | −1.5411741 | 0.03449299 |
| | | | HDAC4_HUMAN | | |
| 249 - 293 | N249 | C293 | MTL5_HUMAN - KRAB- | −1.5412465 | 0.00470719 |
| | | | MeCP2 | | |
| 150 - 32 | N150 | C32 | HDA11_HUMAN - | −1.5416997 | 4.56E−04 |
| | | | Gilbert_Lab_CRISPRi_KRAB | | |
| 105 - 158 | N105 | C158 | MBD2_HUMAN - | −1.5427961 | 0.01747048 |
| | | | SETB1_HUMAN | | |
| 216 - 105 | N216 | C105 | ING5_HUMAN - | −1.5430775 | 2.63E−05 |
| | | | MBD2_HUMAN | | |
| 24 - 298 | N24 | C298 | CTCFL - MBD2b | −1.5440097 | 1.85E−04 |
| 196 - 56 | N196 | C56 | MTA1_HUMAN - | −1.544922 | 0.00486273 |
| | | | SUV92_HUMAN | | |
| 167 - 164 | N167 | C164 | EHMT1_HUMAN - | −1.5458399 | 0.02416352 |
| | | | SIR5_HUMAN | | |
| 250 - 298 | N250 | C298 | HCFC1_HUMAN - MBD2b | −1.5461085 | 0.02431457 |
| 12 - 298 | N12 | C298 | KMT2A - MBD2b | −1.5463801 | 8.86E−05 |
| 68 - 313 | N68 | C313 | MBD3_HUMAN - SaII | −1.5465558 | 5.48E−04 |
| 206 - 105 | N206 | C105 | SETD9_HUMAN - | −1.5473976 | 6.01E−04 |
| | | | MBD2_HUMAN | | |
| 298 - 275 | N298 | C275 | MBD2b - DOT1L- | −1.5480803 | 0.00443389 |
| | | | DOT1_domain | | |
| 154 - 334 | N154 | C334 | NSD2_HUMAN - hs_RCOR1 | −1.5482714 | 0.00130974 |
| 222 - 68 | N222 | 268 | IN80E_HUMAN - | −1.5485965 | 1.25E−04 |
| | | | MBD3_HUMAN | | |
| 293 - 345 | N293 | C345 | KRAB-MeCP2 - | −1.5485985 | 0.00146311 |
| | | | MSX2_HUMAN | | |
| 17 - 298 | N17 | C298 | EZH2 - MBD2b | −1.5494771 | 1.59E−05 |
| 217 - 7 | N217 | C7 | CHRC1_HUMAN - ZNF10 | −1.5497809 | 0.01670789 |
| 136 - 51 | N136 | C51 | JMJD6_HUMAN - | −1.5504112 | 0.02329556 |
| | | | UCHL5_HUMAN | | |
| 165 - 233 | N165 | C233 | MTA2_HUMAN - | −1.5510688 | 0.00287181 |
| | | | HINFP_HUMAN | | |
| 298 - 270 | N298 | C270 | MBD2b - ENL | −1.5516204 | 2.89E−04 |
| 344 - 12 | N344 | C12 | HDAC3_HUMAN - KMT2A | −1.5517322 | 0.01554923 |
| 149 - 105 | N149 | C105 | MBD1_HUMAN - | −1.5523112 | 1.56E−04 |
| | | | MBD2_HUMAN | | |
| 312 - 105 | N312 | C105 | SetD8 - MBD2_HUMAN | −1.5524938 | 2.58E−04 |
| 217 - 298 | N217 | C298 | CHRC1_HUMAN - MBD2b | −1.5534334 | 1.34E−04 |
| 135 - 191 | N135 | C191 | KDM2A_HUMAN - | −1.5548023 | 0.04367548 |
| | | | CDYL_HUMAN | | |
| 105 - 293 | N105 | C293 | MBD2_HUMAN - KRAB- | −1.554885 | 0.01590004 |
| | | | MeCP2 | | |
| 123 - 298 | N123 | C298 | KMT2A_HUMAN - MBD2b | −1.554904 | 0.00106478 |
| 165 - 88 | N165 | C88 | MTA2_HUMAN - | −1.5557347 | 0.00591082 |
| | | | ING4_HUMAN | | |
| 299 - 191 | N299 | C191 | HST2 - CDYL_HUMAN | −1.5561699 | 0.0444721 |
| 85 - 331 | N85 | C331 | SMYD3_HUMAN - mm_G9a | −1.5571898 | 0.02286424 |
| 185 - 299 | N185 | C299 | RBBP7_HUMAN - HST2 | −1.5576389 | 8.37E−04 |
| 170 - 105 | N170 | C105 | NSD1_HUMAN - | −1.5594698 | 0.02772646 |
| | | | MBD2_HUMAN | | |
| 344 - 190 | N344 | C190 | HDAC3_HUMAN - | −1.5594698 | 0.02772646 |
| | | | ANM1_HUMAN | | |
| 119 - 253 | N119 | C253 | ACL6A_HUMAN - | −1.5607654 | 0.01709049 |
| | | | RBBP5_HUMAN | | |
| 346 - 215 | N346 | C215 | MSX2_HUMAN - | −1.5617567 | 0.00102869 |
| | | | HDAC4_HUMAN | | |
| 110 - 298 | N110 | C298 | JMJD4_HUMAN - MBD2b | −1.5627301 | 0.00325018 |
| 317 - 210 | N317 | C210 | HDAC3 - SIR3_HUMAN | −1.5632175 | 0.01041552 |
| 215 - 320 | N215 | C320 | HDAC4_HUMAN - mMLL3- | −1.5638958 | 0.03010412 |
| | | | SET | | |
| 293 - 135 | N293 | C135 | KRAB-MeCP2 - | −1.5641856 | 0.00825643 |
| | | | KDM2A_HUMAN | | |
| 165 - 99 | N165 | C99 | MTA2_HUMAN - | −1.5645011 | 0.0193658 |
| | | | IN80C_HUMAN | | |
| 1 - 265 | N1 | C265 | SETD1A - EZH2 | −1.5646854 | 0.02338345 |
| 3 - 255 | N3 | C255 | HDAC3 - EED_HUMAN | −1.5656092 | 0.00125286 |
| 334 - 214 | N334 | C214 | hs_RCOR1 - | −1.5672112 | 0.04490514 |
| | | | HDAC4_HUMAN | | |
| 306 - 152 | N306 | C152 | CobB - CDY1_HUMAN | −1.5715453 | 5.04E−04 |
| 289 - 298 | N289 | C298 | FOG1 - MBD2b | −1.5720041 | 0.00101534 |
| 12 - 105 | N12 | C105 | KMT2A - MBD2_HUMAN | −1.5725606 | 7.55E−05 |
| 317 - 25 | N317 | C25 | HDAC3 - CTCFL | −1.5737024 | 0.00109859 |
| 204 - 191 | N204 | C191 | HIF1N_HUMAN - | −1.5739069 | 0.02867925 |
| | | | CDYL_HUMAN | | |
| 105 - 118 | N105 | C118 | MBD2_HUMAN - | −1.5744875 | 2.97E−04 |
| | | | HDAC6_HUMAN | | |
| 312 - 55 | N312 | C55 | SetD8 - RBBP4_HUMAN | −1.5765779 | 0.01769547 |
| 298 - 266 | N298 | C266 | MBD2b - GADD45A | −1.5766278 | 8.03E−04 |
| 105 - 241 | N105 | C241 | MBD2_HUMAN - | −1.5773052 | 0.01483836 |
| | | | SIR2_HUMAN | | |
| 280 - 298 | N280 | C298 | CBF1-Cterm - MBD2b | −1.5773812 | 5.60E−05 |
| 212 - 215 | N212 | C215 | HDAC8_HUMAN - | −1.5781383 | 0.00144208 |
| | | | HDAC4_HUMAN | | |
| 162 -105 | N162 | C105 | SIR6_HUMAN - | −1.5784693 | 3.09E−04 |
| | | | MBD2_HUMAN | | |
| 298 - 2 | N298 | C2 | MBD2b - SETD1A | −1.5796868 | 0.01378234 |
| 324 - 298 | N324 | C298 | LBR_HUMAN - MBD2b | −1.5815887 | 0.00110677 |
| 298 - 47 | N298 | C47 | MBD2b - ANM2_HUMAN | −1.582243 | 0.00755423 |
| 143 - 68 | N143 | C68 | KDM4B_HUMAN - | −1.5822912 | 0.01205189 |
| | | | MBD3_HUMAN | | |
| 344 - 206 | N344 | C206 | HDAC3_HUMAN - | −1.582494 | 0.02132743 |
| | | | SETD9_HUMAN | | |
| 105 - 70 | N105 | C70 | MBD2_HUMAN - | −1.5827501 | 0.00235541 |
| | | | SETB2_HUMAN | | |
| 312 - 298 | N312 | C298 | SetD8 - MBD2b | −1.5832522 | 1.75E−04 |
| 105 - 278 | N105 | C278 | MBD2_HUMAN - TET2CD | −1.5837603 | 8.46E−04 |
| 3 - 190 | N3 | C190 | HDAC3 - ANM1_HUMAN | −1.5846249 | 0.00219674 |
| 167 - 68 | N167 | C68 | EHMT1_HUMAN - | −1.5846502 | 0.0019446 |
| | | | MBD3_HUMAN | | |
| 95 - 332 | N95 | C332 | SETD6_HUMAN - hs_SIRT5 | −1.5848129 | 0.01597805 |
| 88 - 105 | N88 | C105 | ING4_HUMAN - | −1.5849423 | 8.79E−05 |
| | | | MBD2_HUMAN | | |
| 254 - 34 | N254 | C34 | MEN1_HUMAN - DNMT3A- | −1.5850395 | 0.01033726 |
| | | | 3L_JKNp112 | | |
| 313 - 68 | N313 | C68 | SaII - MBD3_HUMAN | −1.5855589 | 0.00165367 |
| 257 - 105 | N257 | C105 | c-Myb-TAD - | −1.5867136 | 0.00168449 |
| | | | MBD2_HUMAN | | |
| 182 - 32 | N182 | C32 | MTA3_HUMAN - | −1.5893947 | 0.01841587 |
| | | | Gilbert_Lab_CRISPRi_KRAB | | |
| 131 - 299 | N131 | C299 | PRDM2_HUMAN - HST2 | −1.5894802 | 0.01457139 |
| 196 - 324 | N196 | C324 | MTA1_HUMAN - | −1.5894955 | 0.01803363 |
| | | | LBR_HUMAN | | |
| 266 - 298 | N266 | C298 | GADD45A - MBD2b | −1.5895562 | 5.61E−05 |
| 24 - 343 | N24 | C343 | CTCFL - NCOR2_HUMAN | −1.5906734 | 0.03892218 |
| 108 - 68 | N108 | C68 | KAT6B_HUMAN - | −1.5914048 | 0.00484546 |
| | | | MBD3_HUMAN | | |
| 293 - 68 | N293 | C68 | KRAB-MeCP2 - | −1.5923949 | 0.00012435 |
| | | | MBD3_HUMAN | | |
| 317 - 233 | N317 | C233 | HDAC3 - HINFP_HUMAN | −1.5928398 | 0.01226108 |
| 215 - 17 | N215 | C17 | HDAC4_HUMAN - EZH2 | −1.5929974 | 0.00858138 |
| 105 - 8 | N105 | C8 | MBD2_HUMAN - MECP2 | −1.5933243 | 0.00464101 |
| 295 - 306 | N295 | C306 | SET-TAF1B - CobB | −1.5941622 | 0.00213682 |
| 298 - 63 | N298 | C63 | MBD2b - SMYD5_HUMAN | −1.5962905 | 0.00146166 |
| 206 - 298 | N206 | C298 | SETD9_HUMAN - MBD2b | −1.5963869 | 4.04E−05 |
| 298 - 246 | N298 | C246 | MBD2b - ATRX_HUMAN | −1.5965571 | 0.00505911 |
| 186 - 68 | N186 | C68 | RIOX2_HUMAN - | −1.5967437 | 0.00117035 |
| | | | MBD3_HUMAN | | |
| 165 - 250 | N165 | C250 | MTA2_HUMAN - | −1.59697 | 0.01367641 |
| | | | HCFC1_HUMAN | | |
| 3 - 192 | N3 | C192 | HDAC3 - JHD2C_HUMAN | −1.5983577 | 0.02453805 |
| 55 - 189 | N55 | C189 | RBBP4_HUMAN - | −1.5984246 | 0.0014827 |
| | | | ING2_HUMAN | | |
| 55 - 217 | N55 | C217 | RBBP4_HUMAN - | −1.5991823 | 1.68E−04 |
| | | | CHRC1_HUMAN | | |
| 55 - 69 | N55 | C69 | RBBP4_HUMAN - | −1.5992598 | 3.26E−05 |
| | | | SETB2_HUMAN | | |
| 298 - 218 | N298 | C218 | MBD2b - IN80B_HUMAN | −1.5996029 | 0.00716082 |
| 3 - 111 | N3 | C111 | HDAC3 - KDM5A_HUMAN | −1.6001062 | 5.71E−04 |
| 78 - 293 | N78 | C293 | KAT6A_HUMAN - KRAB- | −1.6019278 | 0.0012595 |
| | | | MeCP2 | | |
| 131 - 213 | N131 | C213 | PRDM2_HUMAN - | −1.6022441 | 0.02696891 |
| | | | HBAP1_HUMAN | | |
| 320 - 298 | N320 | C298 | mMLL3-SET - MBD2b | −1.6034044 | 0.00513292 |
| 150 - 105 | N150 | C105 | HDA11_HUMAN - | −1.60416 | 5.23E−04 |
| | | | MBD2_HUMAN | | |
| 138 - 68 | N138 | C68 | TFPT_HUMAN - | −1.6048584 | 0.02202212 |
| | | | MBD3_HUMAN | | |
| 73 - 68 | N73 | C68 | KDM5D_HUMAN - | −1.6069611 | 0.00270211 |
| | | | MBD3_HUMAN | | |
| 196 - 320 | N196 | C320 | MTA1_HUMAN - mMLL3- | −1.6071151 | 2.69E−04 |
| | | | SET | | |
| 253 - 7 | N253 | C7 | RBBP5_HUMAN - ZNF10 | −1.6074045 | 0.01466138 |
| 239 - 105 | N239 | C105 | KDM8_HUMAN - | −1.6091679 | 2.49E−04 |
| | | | MBD2_HUMAN | | |
| 329 - 105 | N329 | C105 | pbcv1_vSET - | −1.6108533 | 6.74E−04 |
| | | | MBD2_HUMAN | | |
| 120 - 306 | N120 | C306 | RING1_HUMAN - CobB | −1.6110622 | 0.00387116 |
| 309 - 27 | N309 | C27 | HDAC8 - EZH1 | −1.6134154 | 0.02536678 |
| 3 - 298 | N3 | C298 | HDAC3 - MBD2b | −1.6136149 | 1.26E−04 |
| 174 - 32 | N174 | C32 | HDAC1_HUMAN - | −1.6140704 | 0.02319837 |
| | | | Gilbert_Lab_CRISPRi_KRAB | | |
| 105 - 276 | N105 | C276 | MBD2_HUMAN - | −1.6143782 | 0.0163313 |
| | | | EHMT2(G9a)-Cterm | | |
| 194 - 152 | N194 | C152 | ING1_HUMAN - | −1.6144256 | 0.02035681 |
| | | | CDY1_HUMAN | | |
| 301 - 177 | N301 | C177 | SIRT3 - KDM5C_HUMAN | −1.6149111 | 0.01863025 |
| 332 - 105 | N332 | C105 | hs_SIRT5 - MBD2_HUMAN | −1.6155864 | 2.86E−04 |
| 314 - 94 | N314 | C94 | MeCP2 - KDM3B_HUMAN | −1.6158677 | 0.01981182 |
| 219 - 306 | N219 | C306 | JARD2_HUMAN - CobB | −1.6185787 | 0.02826827 |
| 88 - 167 | N88 | C167 | ING4_HUMAN - | −1.6190697 | 0.0142021 |
| | | | EHMT1_HUMAN | | |
| 15 - 191 | N15 | C191 | EP300 - CDYL_HUMAN | −1.6196587 | 0.02089733 |
| 182 - 202 | N182 | C202 | MTA3_HUMAN - | −1.6199428 | 0.0028329 |
| | | | KDM2B_HUMAN | | |
| 173 - 105 | N173 | C105 | SIR4_HUMAN - | −1.6221762 | 2.97E−06 |
| | | | MBD2_HUMAN | | |
| 273 - 32 | N273 | C32 | PRDM9-CD - | −1.6226431 | 0.00184145 |
| | | | Gilbert_Lab_CRISPRi_KRAB | | |
| 106 - 165 | N106 | C165 | KAT6B_HUMAN - | −1.6232041 | 8.48E−04 |
| | | | MTA2_HUMAN | | |
| 246 - 105 | N246 | C105 | ATRX_HUMAN - | −1.6234905 | 7.44E−05 |
| | | | MBD2_HUMAN | | |
| 306 - 313 | N306 | C313 | CobB - SaII | −1.6238461 | 7.47E−06 |
| 57 - 105 | N57 | C105 | ANM8_HUMAN - | −1.6246175 | 9.59E−05 |
| | | | MBD2_HUMAN | | |
| 298 - 334 | N298 | C334 | MBD2b - hs_RCOR1 | −1.6247149 | 0.00398937 |
| 269 - 298 | N269 | C298 | PU.1 - MBD2b | −1.6252969 | 9.44E−06 |
| 3 - 322 | N3 | C322 | HDAC3 - MINT_HUMAN | −1.6259005 | 0.02663124 |
| 182 - 26 | N182 | C26 | MTA3_HUMAN - EZH1 | −1.6260278 | 2.88E−05 |
| 237 - 127 | N237 | C127 | KAT5_HUMAN - | −1.6267479 | 0.03237688 |
| | | | SETMR_HUMAN | | |
| 298 - 111 | N298 | C111 | MBD2b - KDM5A_HUMAN | −1.6272556 | 4.40E−04 |
| 55 - 149 | N55 | C149 | RBBP4_HUMAN - | −1.6281931 | 0.00574739 |
| | | | MBD1_HUMAN | | |
| 298 - 212 | N298 | C212 | MBD2b - HDAC8_HUMAN | −1.6288425 | 8.50E−04 |
| 267 - 105 | N267 | C105 | FOXA1-Nterm - | −1.6296159 | 0.00287507 |
| | | | MBD2_HUMAN | | |
| 105 - 219 | N105 | C219 | MBD2_HUMAN - | −1.6307815 | 0.00259128 |
| | | | JARD2_HUMAN | | |
| 68 - 187 | N68 | C187 | MBD3_HUMAN - | −1.6315285 | 0.01260479 |
| | | | MBD4_HUMAN | | |
| 190 - 191 | N190 | C191 | ANM1_HUMAN - | −1.6315803 | 0.01332131 |
| | | | CDYL_HUMAN | | |
| 18 - 191 | N18 | C191 | EZH2 - CDYL_HUMAN | −1.6318309 | 0.00369497 |
| 3 - 186 | N3 | C186 | HDAC3 - RIOX2_HUMAN | −1.6329916 | 1.53E−04 |
| 9 - 134 | N9 | C134 | MECP2 - KDM2A_HUMAN | −1.6335226 | 0.0297053 |
| 165 - 15 | N165 | C15 | MTA2_HUMAN - EP300 | −1.6335982 | 0.0238358 |
| 138 - 293 | N138 | C293 | TFPT_HUMAN - KRAB- | −1.6336823 | 0.00147132 |
| | | | MeCP2 | | |
| 68 - 252 | N68 | C252 | MBD3_HUMAN - | −1.6339001 | 0.00444697 |
| | | | HCFC1_HUMAN | | |
| 55 - 288 | N55 | C288 | RBBP4_HUMAN - | −1.6339552 | 7.25E−04 |
| | | | SUV[SET] | | |
| 254 - 68 | N254 | C68 | MEN1_HUMAN - | −1.6356559 | 0.01484048 |
| | | | MBD3_HUMAN | | |
| 205 - 189 | N205 | C189 | JMJD7_HUMAN - | −1.6357523 | 0.01549219 |
| | | | ING2_HUMAN | | |
| 293 - 205 | N293 | C205 | KRAB-MeCP2 - | −1.6365113 | 0.01017227 |
| | | | JMJD7_HUMAN | | |
| 55 - 222 | N55 | C222 | RBBP4_HUMAN - | −1.6367544 | 1.42E−04 |
| | | | IN80E_HUMAN | | |
| 158 - 133 | N158 | C133 | SETB1_HUMAN - | −1.6375752 | 0.02843787 |
| | | | KAT8_HUMAN | | |
| 9 - 215 | N9 | C215 | MECP2 - HDAC4_HUMAN | −1.637943 | 0.01325898 |
| 155 - 105 | N155 | C105 | NSD2_HUMAN - | −1.6381396 | 3.38E−04 |
| | | | MBD2_HUMAN | | |
| 277 - 105 | N277 | C105 | SUV39H1 - MBD2_HUMAN | −1.6389282 | 0.00117136 |
| 138 - 215 | N138 | C215 | TFPT_HUMAN - | −1.6390795 | 0.03151708 |
| | | | HDAC4_HUMAN | | |
| 3 - 85 | N3 | C85 | HDAC3 - SMYD3_HUMAN | −1.6407901 | 0.00543388 |
| 135 - 32 | N135 | C32 | KDM2A_HUMAN - | −1.6411401 | 5.78E−04 |
| | | | Gilbert_Lab_CRISPRi_KRAB | | |
| 105 - 246 | N105 | C246 | MBD2_HUMAN - | −1.6414918 | 8.97E−05 |
| | | | ATRX_HUMAN | | |
| 300 - 298 | N300 | C298 | SIRT6 - MBD2b | −1.6419835 | 0.00617146 |
| 18 - 298 | N18 | C298 | EZH2 - MBD2b | −1.64214 | 2.40E−05 |
| 228 - 313 | N228 | C313 | HDAC7_HUMAN - SaII | −1.6422538 | 0.0019882 |
| 30 - 105 | N30 | C105 | KDM3A - MBD2_HUMAN | −1.6426112 | 4.46E−04 |
| 105 - 331 | N105 | C331 | MBD2_HUMAN - mm_G9a | −1.6434849 | 2.68E−05 |
| 3 - 45 | N3 | C45 | HDAC3 - KMT2D_HUMAN | −1.6443655 | 0.00303085 |
| 105 - 248 | N105 | C248 | MBD2_HUMAN - | −1.6450389 | 0.00170948 |
| | | | GLYR1_HUMAN | | |
| 196 - 73 | N196 | C73 | MTA1_HUMAN - | −1.6459223 | 0.00230273 |
| | | | KDM5D_HUMAN | | |
| 196 - 185 | N196 | C185 | MTA1_HUMAN - | −1.6460251 | 0.00487218 |
| | | | RBBP7_HUMAN | | |
| 178 - 293 | N178 | C293 | KMT5C_HUMAN - KRAB- | −1.6464616 | 2.08E−04 |
| | | | MeCP2 | | |
| 341 - 73 | N341 | C73 | NCOR2_HUMAN - | −1.6479198 | 0.00119195 |
| | | | KDM5D_HUMAN | | |
| 298 - 107 | N298 | C107 | MBD2b - KAT6B_HUMAN | −1.6480052 | 2.04E−04 |
| 220 - 105 | N220 | C105 | JARD2_HUMAN - | −1.6486131 | 4.06E−04 |
| | | | MBD2_HUMAN | | |
| 233 - 68 | N233 | C68 | HINFP_HUMAN - | −1.6488532 | 6.35E−05 |
| | | | MBD3_HUMAN | | |
| 165 - 111 | N165 | C111 | MTA2_HUMAN - | −1.6520583 | 4.24E−04 |
| | | | KDM5A_HUMAN | | |
| 298 - 118 | N298 | C118 | MBD2b - HDAC6_HUMAN | −1.6539712 | 7.59E−04 |
| 149 - 191 | N149 | C191 | MBD1_HUMAN - | −1.6549764 | 0.01564288 |
| | | | CDYL_HUMAN | | |
| 275 - 298 | N275 | C298 | DOT1L-DOT1_domain - | −1.6550466 | 9.78E−05 |
| | | | MBD2b | | |
| 189 - 32 | N189 | C32 | ING2_HUMAN - | −1.6560237 | 2.62E−04 |
| | | | Gilbert_Lab_CRISPRi_KRAB | | |
| 5 - 32 | N5 | C32 | KDM1A - | −1.6567778 | 0.01997851 |
| | | | Gilbert_Lab_CRISPRi_KRAB | | |
| 165 - 272 | N165 | C272 | MTA2_HUMAN - Sir2 | −1.6575585 | 0.01138377 |
| 196 - 130 | N196 | C130 | MTA1_HUMAN - | −1.6575921 | 0.00158798 |
| | | | PRDM2_HUMAN | | |
| 240 - 134 | N240 | C134 | ANM3_HUMAN - | −1.6598066 | 0.02832334 |
| | | | KDM2A_HUMAN | | |
| 105 - 103 | N105 | C103 | MBD2_HUMAN- | −1.6624444 | 0.01412154 |
| | | | B4DKA4_HUMAN | | |
| 327 - 68 | N327 | C68 | hs_NIPP1 - MBD3_HUMAN | −1.6629094 | 4.60E−04 |
| 228 - 299 | N228 | C299 | HDAC7_HUMAN - HST2 | −1.6635389 | 0.01497198 |
| 166 - 293 | N166 | C293 | EHMT1_HUMAN - KRAB- | −1.6640223 | 0.01981775 |
| | | | MeCP2 | | |
| 99 - 298 | N99 | C298 | IN80C_HUMAN - MBD2b | −1.6650269 | 2.17E−05 |
| 293 - 55 | N293 | C55 | KRAB-MeCP2 - | −1.6652288 | 2.30E−04 |
| | | | RBBP4_HUMAN | | |
| 74 - 105 | N74 | C105 | KDM5D_HUMAN - | −1.6662065 | 3.97E−04 |
| | | | MBD2_HUMAN | | |
| 196 - 280 | N196 | C280 | MTA1_HUMAN - CBF1- | −1.6672005 | 0.00576042 |
| | | | Cterm | | |
| 165 - 218 | N165 | C218 | MTA2_HUMAN - | −1.6677546 | 0.02075175 |
| | | | IN80B_HUMAN | | |
| 317 - 191 | N317 | C191 | HDAC3 - CDYL_HUMAN | −1.6685521 | 0.01812756 |
| 313 - 298 | N313 | C298 | SaII - MBD2b | −1.6691778 | 0.00188424 |
| 339 - 306 | N339 | C306 | SPOC1_HUMAN - CobB | −1.6694029 | 0.02901233 |
| 105 - 79 | N105 | C79 | MBD2_HUMAN - | −1.6699155 | 0.00118921 |
| | | | KAT6A_HUMAN | | |
| 164 - 256 | N164 | C256 | SIR5_HUMAN - LSD1-ORF | −1.6702568 | 0.0328352 |
| 298 - 311 | N298 | C311 | MBD2b - Sin3a | −1.6720163 | 1.12E−04 |
| 294 - 36 | N294 | C36 | DIM5 - TET1CD_JKNp84 | −1.672399 | 0.04294134 |
| 105 - 346 | N105 | C346 | MBD2_HUMAN - | −1.6729966 | 5.45E−04 |
| | | | MSX2_HUMAN | | |
| 255 - 105 | N255 | C105 | EED_HUMAN - | −1.6755841 | 2.64E−05 |
| | | | MBD2_HUMAN | | |
| 105 - 91 | N105 | C91 | MBD2_HUMAN - | −1.6787634 | 0.00208052 |
| | | | ANM5_HUMAN | | |
| 298 - 257 | N298 | C257 | MBD2b - c-Myb-TAD | −1.6807646 | 0.01808918 |
| 6 - 293 | N6 | C293 | KDM1A - KRAB-MeCP2 | −1.680942 | 0.00465954 |
| 345 - 293 | N345 | C293 | MSX2_HUMAN - KRAB- | −1.6811355 | 0.00561266 |
| | | | MeCP2 | | |
| 306 - 126 | N306 | C126 | CobB - SETMR_HUMAN | −1.6816162 | 0.00124616 |
| 317 - 69 | N317 | C69 | HDAC3 - SETB2_HUMAN | −1.6825462 | 3.68E−05 |
| 105 - 140 | N105 | C140 | MBD2_HUMAN - | −1.6830873 | 0.02603307 |
| | | | KDM6B_HUMAN | | |
| 45 - 289 | N45 | C289 | KMT2D_HUMAN - FOG1 | −1.6856469 | 0.0424863 |
| 73 - 298 | N73 | C298 | KDM5D_HUMAN - MBD2b | −1.6857345 | 1.24E−04 |
| 105 - 206 | N105 | C206 | MBD2_HUMAN - | −1.6858227 | 0.00845705 |
| | | | SETD9_HUMAN | | |
| 310 -32 | N310 | C32 | TgSET8 - | −1.6858742 | 1.06E−05 |
| | | | Gilbert_Lab_CRISPRi_KRAB | | |
| 313 - 334 | N313 | C334 | SaII - hs_RCOR1 | −1.6863548 | 1.28E−04 |
| 215 - 25 | N215 | C25 | HDAC4_HUMAN - CTCFL | −1.6872308 | 7.93E−04 |
| 202 - 68 | N202 | C68 | KDM2B_HUMAN - | −1.6889765 | 0.00383496 |
| | | | MBD3_HUMAN | | |
| 105 - 3 | N105 | C3 | MBD2_HUMAN - HDAC3 | −1.6930612 | 0.01232821 |
| 105 - 187 | N105 | C187 | MBD2_HUMAN - | −1.6936206 | 0.00131516 |
| | | | MBD4_HUMAN | | |
| 298 - 149 | N298 | C149 | MBD2b - MBD1_HUMAN | −1.6951311 | 3.93E−04 |
| 346 - 191 | N346 | C191 | MSX2_HUMAN - | −1.6960547 | 9.27E−05 |
| | | | CDYL_HUMAN | | |
| 61 - 306 | N61 | C306 | HAT1_HUMAN - CobB | −1.6961224 | 0.00120548 |
| 165 - 7 | N165 | C7 | MTA2_HUMAN - ZNF10 | −1.698744 | 0.00215597 |
| 151 - 298 | N151 | C298 | SIR7_HUMAN - MBD2b | −1.6990446 | 4.55E−05 |
| 256 - 105 | N256 | C105 | LSD1-ORF - | −1.6994665 | 0.00203783 |
| | | | MBD2_HUMAN | | |
| 182 - 87 | N182 | C87 | MTA3_HUMAN - | −1.7007037 | 0.01857656 |
| | | | SETD7_HUMAN | | |
| 346 - 105 | N346 | C105 | MSX2_HUMAN - | −1.7010553 | 1.39E−04 |
| | | | MBD2_HUMAN | | |
| 205 - 298 | N205 | C298 | JMJD7_HUMAN - MBD2b | −1.7013989 | 2.89E−04 |
| 310 - 306 | N310 | C306 | TgSET8 - CobB | −1.7015671 | 9.51E−04 |
| 306 - 143 | N306 | C143 | CobB - KDM4B_HUMAN | −1.7019792 | 0.01171555 |
| 225 - 298 | N225 | C298 | SETD2_HUMAN - MBD2b | −1.704093 | 0.01037515 |
| 25 - 55 | N25 | C55 | CTCFL - RBBP4_HUMAN | −1.7075498 | 1.66E−04 |
| 187 - 334 | N187 | C334 | MBD4_HUMAN - | −1.7084238 | 0.01845954 |
| | | | hs_RCOR1 | | |
| 182 - 12 | N182 | C12 | MTA3_HUMAN - KMT2A | −1.7089565 | 1.92E−04 |
| 78 - 68 | N78 | C68 | KAT6A_HUMAN - | −1.709457 | 1.65E−04 |
| | | | MBD3_HUMAN | | |
| 300 - 334 | N300 | C334 | SIRT6 - hs_RCOR1 | −1.7103347 | 0.03466858 |
| 55 - 227 | N55 | C227 | RBBP4_HUMAN - | −1.7105403 | 0.01342292 |
| | | | SIR1_HUMAN | | |
| 8 - 185 | N8 | C185 | MECP2 - RBBP7_HUMAN | −1.7127799 | 0.00294058 |
| 298 - 190 | N298 | C190 | MBD2b - ANM1_HUMAN | −1.7131698 | 1.71E−04 |
| 148 - 293 | N148 | C293 | NSD3_HUMAN - KRAB- | −1.7137969 | 0.00163077 |
| | | | MeCP2 | | |
| 215 - 288 | N215 | C288 | HDAC4_HUMAN - | −1.7139182 | 1.11E−04 |
| | | | SUV[SET] | | |
| 201 - 63 | N201 | C63 | KDM2B_HUMAN - | −1.7139562 | 0.01525073 |
| | | | SMYD5_HUMAN | | |
| 131 - 25 | N131 | C25 | PRDM2_HUMAN - CTCFL | −1.7141941 | 7.17E−04 |
| 306 - 186 | N306 | C186 | CobB - RIOX2_HUMAN | −1.7185457 | 1.26E−05 |
| 165 - 87 | N165 | C87 | MTA2_HUMAN - | −1.7189447 | 0.0189022 |
| | | | SETD7_HUMAN | | |
| 194 - 68 | N194 | C68 | ING1_HUMAN - | −1.7194599 | 1.54E−04 |
| | | | MBD3_HUMAN | | |
| 341 - 313 | N341 | C313 | NCOR2_HUMAN - SaII | −1.719712 | 2.48E−05 |
| 9 - 182 | N9 | C182 | MECP2 - MTA3_HUMAN | −1.7208572 | 0.00947334 |
| 20 - 216 | N20 | C216 | KDM1B - ING5_HUMAN | −1.7211987 | 0.01745138 |
| 167 - 105 | N167 | C105 | EHMT1_HUMAN - | −1.7213657 | 5.16E−04 |
| | | | MBD2_HUMAN | | |
| 3 - 289 | N3 | C289 | HDAC3 - FOG1 | −1.7217623 | 8.25E−04 |
| 344 - 298 | N344 | C298 | HDAC3_HUMAN - MBD2b | −1.721777 | 1.24E−04 |
| 329 - 191 | N329 | C191 | pbcv1_vSET - | −1.7223764 | 8.69E−04 |
| | | | CDYL_HUMAN | | |
| 297 - 105 | N297 | C105 | MesoLo - MBD2_HUMAN | −1.7240573 | 2.09E−05 |
| 190 - 32 | N190 | C32 | ANM1_HUMAN - | −1.7260307 | 1.68E−04 |
| | | | Gilbert_Lab_CRISPRi_KRAB | | |
| 222 - 32 | N222 | C32 | IN80E_HUMAN - | −1.7260658 | 0.00103216 |
| | | | Gilbert_Lab_CRISPRi_KRAB | | |
| 200 - 105 | N200 | C105 | ARP5_HUMAN - | −1.7265487 | 6.72E−04 |
| | | | MBD2_HUMAN | | |
| 68 - 214 | N68 | C214 | MBD3_HUMAN - | −1.7270721 | 0.00314718 |
| | | | HDAC4_HUMAN | | |
| 239 - 298 | N239 | C298 | KDM8_HUMAN - MBD2b | −1.727188 | 0.0280994 |
| 105 - 290 | N105 | C290 | MBD2_HUMAN - HP1aCS | −1.7273761 | 5.32E−05 |
| 204 - 69 | N204 | C69 | HIF1N_HUMAN - | −1.7276374 | 0.0064521 |
| | | | SETB2_HUMAN | | |
| 1 - 293 | N1 | C293 | SETD1A - KRAB-MeCP2 | −1.7297444 | 1.69E−04 |
| 165 - 290 | N165 | C290 | MTA2_HUMAN - HP1aCS | −1.7303898 | 1.45E−04 |
| 105 - 1 | N105 | C1 | MBD2_HUMAN - SETD1A | −1.7303901 | 0.0011958 |
| 212 - 165 | N212 | C165 | HDAC8_HUMAN - | −1.7322666 | 0.00452766 |
| | | | MTA2_HUMAN | | |
| 298 - 57 | N298 | C57 | MBD2b - ANM8_HUMAN | −1.732775 | 9.41E−04 |
| 215 - 266 | N215 | C266 | HDAC4_HUMAN - | −1.7340837 | 5.71E−05 |
| | | | GADD45A | | |
| 106 - 215 | N106 | C215 | KAT6B_HUMAN - | −1.7343685 | 1.27E−04 |
| | | | HDAC4_HUMAN | | |
| 154 - 293 | N154 | C293 | NSD2_HUMAN - KRAB- | −1.7345978 | 0.00131797 |
| | | | MeCP2 | | |
| 298 - 320 | N298 | C320 | MBD2b - mMLL3-SET | −1.7363746 | 6.40E−06 |
| 105 - 275 | N105 | C275 | MBD2_HUMAN - DOT1L- | −1.7374523 | 1.04E−05 |
| | | | DOT1_domain | | |
| 105 - 268 | N105 | C268 | MBD2_HUMAN - FOXA1- | −1.7411298 | 1.49E−04 |
| | | | Cterm | | |
| 295 - 298 | N295 | C298 | SET-TAF1B - MBD2b | −1.7423416 | 0.00485995 |
| 69 - 191 | N69 | C191 | SETB2_HUMAN - | −1.7425259 | 6.97E−06 |
| | | | CDYL_HUMAN | | |
| 3 - 241 | N3 | C241 | HDAC3 - SIR2_HUMAN | −1.7430297 | 4.40E−04 |
| 215 - 313 | N215 | C313 | HDAC4_HUMAN - SaII | −1.7448429 | 0.00100839 |
| 105 - 110 | N105 | C110 | MBD2_HUMAN - | −1.7468311 | 0.00954122 |
| | | | JMJD4_HUMAN | | |
| 222 - 298 | N222 | C298 | IN80E_HUMAN - MBD2b | −1.7476244 | 4.10E−05 |
| 170 - 32 | N170 | C32 | NSD1_HUMAN - | −1.7504031 | 0.00362098 |
| | | | Gilbert_Lab_CRISPRi_KRAB | | |
| 341 - 99 | N341 | C99 | NCOR2_HUMAN - | −1.7523751 | 0.0033306 |
| | | | IN80C_HUMAN | | |
| 3 - 118 | N3 | C118 | HDAC3 - HDAC6_HUMAN | −1.7526799 | 2.36E−04 |
| 55 - 190 | N55 | C190 | RBBP4_HUMAN - | −1.7527385 | 0.00250211 |
| | | | ANM1_HUMAN | | |
| 189 - 298 | N189 | C298 | ING2_HUMAN - MBD2b | −1.7527825 | 3.28E−06 |
| 298 - 154 | N298 | C154 | MBD2b - NSD2_HUMAN | −1.7539593 | 0.00455586 |
| 55 - 7 | N55 | C7 | RBBP4_HUMAN - ZNF10 | −1.7558686 | 1.93E−05 |
| 194 - 32 | N194 | C32 | ING1_HUMAN - | −1.7560811 | 3.60E−05 |
| | | | Gilbert_Lab_CRISPRi_KRAB | | |
| 339 - 105 | N339 | C105 | SPOC1_HUMAN - | −1.756589 | 0.00672608 |
| | | | MBD2_HUMAN | | |
| 182 - 130 | N182 | C130 | MTA3_HUMAN - | −1.7588659 | 0.00608218 |
| | | | PRDM2_HUMAN | | |
| 105 - 297 | N105 | C297 | MBD2_HUMAN - MesoLo | −1.7593258 | 1.14E−05 |
| 3 - 63 | N3 | C63 | HDAC3 - SMYD5_HUMAN | −1.7605722 | 5.59E−05 |
| 116 - 298 | N116 | C298 | ANM6_HUMAN - MBD2b | −1.7625006 | 1.28E−05 |
| 269 - 105 | N269 | C105 | PU.1 - MBD2_HUMAN | −1.7628334 | 7.78E−06 |
| 346 - 321 | N346 | C321 | MSX2_HUMAN - | −1.7637697 | 0.01076756 |
| | | | MINT_HUMAN | | |
| 69 - 341 | N69 | C341 | SETB2_HUMAN - | −1.7641418 | 0.00435045 |
| | | | NCOR2_HUMAN | | |
| 315 - 105 | N315 | C105 | NCoR - MBD2_HUMAN | −1.7644037 | 1.73E−04 |
| 68 - 327 | N68 | C327 | MBD3_HUMAN - hs_NIPP1 | −1.7659127 | 1.13E−05 |
| 136 - 341 | N136 | C341 | JMJD6_HUMAN - | −1.7662806 | 0.01840171 |
| | | | NCOR2_HUMAN | | |
| 298 - 87 | N298 | C87 | MBD2b - SETD7_HUMAN | −1.7668418 | 2.31E−04 |
| 298 - 85 | N298 | C85 | MBD2b - SMYD3_HUMAN | −1.7687979 | 0.00242415 |
| 182 - 233 | N182 | C233 | MTA3_HUMAN - | −1.7695164 | 0.00145079 |
| | | | HINFP_HUMAN | | |
| 294 - 22 | N294 | C22 | DIM5 - TET1 | −1.770059 | 0.03073939 |
| 197 - 298 | N197 | C298 | SUV91_HUMAN - MBD2b | −1.7708926 | 0.00635594 |
| 148 - 298 | N148 | C298 | NSD3_HUMAN - MBD2b | −1.7717119 | 4.80E−05 |
| 136 - 293 | N136 | C293 | JMJD6_HUMAN - KRAB- | −1.7721291 | 2.95E−04 |
| | | | MeCP2 | | |
| 105 - 267 | N105 | C267 | MBD2_HUMAN - FOXA1- | −1.774195 | 2.86E−04 |
| | | | Nterm | | |
| 332 - 68 | N332 | C68 | hs_SIRT5 - MBD3_HUMAN | −1.774316 | 3.34E−04 |
| 3 - 231 | N3 | C231 | HDAC3 - KDM5B_HUMAN | −1.7754366 | 0.02116604 |
| 222 - 55 | N222 | C55 | IN80E_HUMAN - | −1.775884 | 0.00133817 |
| | | | RBBP4_HUMAN | | |
| 307 - 293 | N307 | C293 | KYP - KRAB-MeCP2 | −1.7779229 | 0.00281174 |
| 105 - 217 | N105 | C217 | MBD2_HUMAN - | −1.7796568 | 0.00728676 |
| | | | CHRC1_HUMAN | | |
| 105 -262 | N105 | C262 | MBD2_HUMAN - EZH2 | −1.781203 | 0.00214045 |
| 341 - 63 | N341 | C63 | NCOR2_HUMAN - | −1.7834875 | 0.02067537 |
| | | | SMYD5_HUMAN | | |
| 118 - 105 | N118 | C105 | HDAC6_HUMAN - | −1.7840365 | 4.16E−04 |
| | | | MBD2_HUMAN | | |
| 165 - 217 | N165 | C217 | MTA2_HUMAN - | −1.7862504 | 5.29E−04 |
| | | | CHRC1_HUMAN | | |
| 165 - 186 | N165 | C186 | MTA2_HUMAN - | −1.7862652 | 0.00573336 |
| | | | RIOX2_HUMAN | | |
| 111 - 191 | N111 | C191 | KDM5A_HUMAN - | −1.7874439 | 0.00118982 |
| | | | CDYL_HUMAN | | |
| 215 - 269 | N215 | C269 | HDAC4_HUMAN - PU.1 | −1.7879938 | 5.70E−05 |
| 215 - 98 | N215 | C98 | HDAC4_HUMAN - | −1.7902461 | 0.00197237 |
| | | | A4FU79_HUMAN | | |
| 105 - 105 | N105 | C105 | MBD2_HUMAN - | −1.7904977 | 2.92E−06 |
| | | | MBD2_HUMAN | | |
| 3 - 134 | N3 | C134 | HDAC3 - KDM2A_HUMAN | −1.7909602 | 0.01611343 |
| 346 - 341 | N346 | C341 | MSX2_HUMAN - | −1.7916758 | 4.00E−04 |
| | | | NCOR2_HUMAN | | |
| 138 - 32 | N138 | C32 | TFPT_HUMAN - | −1.7917328 | 0.00611771 |
| | | | Gilbert_Lab_CRISPRi_KRAB | | |
| 215 - 332 | N215 | C332 | HDAC4_HUMAN - | −1.7917535 | 0.02545074 |
| | | | hs_SIRT5 | | |
| 322 - 298 | N322 | C298 | MINT_HUMAN - MBD2b | −1.7921445 | 0.00145583 |
| 87 - 202 | N87 | C202 | SETD7_HUMAN - | −1.7925498 | 0.0225164 |
| | | | KDM2B_HUMAN | | |
| 310 - 68 | N310 | C68 | TgSET8 - MBD3_HUMAN | −1.7931945 | 0.00292839 |
| 18 - 105 | N18 | C105 | EZH2 - MBD2_HUMAN | −1.7947621 | 9.01E−06 |
| 105 -320 | N105 | C320 | MBD2_HUMAN - mMLL3- | −1.7960244 | 6.20E−06 |
| | | | SET | | |
| 151 - 68 | N151 | C68 | SIR7_HUMAN - | −1.7974605 | 1.49E−06 |
| | | | MBD3_HUMAN | | |
| 165 - 289 | N165 | C289 | MTA2_HUMAN - FOG1 | −1.7985615 | 7.34E−04 |
| 302 - 298 | N302 | C298 | HDAC11 - MBD2b | −1.7992054 | 0.00949413 |
| 3 - 185 | N3 | C185 | HDAC3 - RBBP7_HUMAN | −1.8018703 | 2.51E−04 |
| 196 - 349 | N196 | C349 | MTA1_HUMAN - | −1.8029409 | 0.00548681 |
| | | | DAM_N132A | | |
| 55 - 255 | N55 | C255 | RBBP4_HUMAN - | −1.8032086 | 4.33E−05 |
| | | | EED_HUMAN | | |
| 298 - 296 | N298 | C296 | MBD2b - HP1a | −1.8036233 | 3.69E−05 |
| 310 - 293 | N310 | C293 | TgSET8 - KRAB-MeCP2 | −1.8039059 | 9.75E−04 |
| 55 - 299 | N55 | C299 | RBBP4_HUMAN - HST2 | −1.8078453 | 2.83E−06 |
| 105 - 69 | N105 | C69 | MBD2_HUMAN - | −1.8088303 | 6.18E−06 |
| | | | SETB2_HUMAN | | |
| 154 - 68 | N154 | C68 | NSD2_HUMAN - | −1.8100674 | 3.56E−04 |
| | | | MBD3_HUMAN | | |
| 298 - 299 | N298 | C299 | MBD2b - HST2 | −1.8103663 | 9.65E−05 |
| 105 - 226 | N105 | C226 | MBD2_HUMAN - | −1.810724 | 5.26E−05 |
| | | | SETD2_HUMAN | | |
| 68 - 298 | N68 | C298 | MBD3_HUMAN - MBD2b | −1.8110932 | 0.00259162 |
| 5 - 191 | N5 | C191 | KDM1A - CDYL_HUMAN | −1.8116465 | 9.31E−05 |
| 38 - 55 | N38 | C55 | EHMT2 - RBBP4_HUMAN | −1.8117574 | 0.01184303 |
| 298 - 345 | N298 | C345 | MBD2b - MSX2_HUMAN | −1.8121053 | 9.51E−05 |
| 182 - 270 | N182 | C270 | MTA3_HUMAN - ENL | −1.8156232 | 0.0034193 |
| 263 - 306 | N263 | C306 | HDAC8 - CobB | −1.8162475 | 3.99E−04 |
| 85 - 68 | N85 | C68 | SMYD3_HUMAN - | −1.8162846 | 0.00135101 |
| | | | MBD3_HUMAN | | |
| 341 - 27 | N341 | C27 | NCOR2_HUMAN - EZH1 | −1.8182086 | 0.0090925 |
| 105 - 55 | N105 | C55 | MBD2_HUMAN - | −1.8182423 | 0.00294624 |
| | | | RBBP4_HUMAN | | |
| 256 - 1 | N256 | C1 | LSD1-ORF - SETD1A | −1.8196161 | 7.35E−05 |
| 131 - 313 | N131 | C313 | PRDM2_HUMAN - SaII | −1.8222366 | 0.00493293 |
| 3 - 130 | N3 | C130 | HDAC3 - PRDM2_HUMAN | −1.8230989 | 4.90E−05 |
| 55 - 314 | N55 | C314 | RBBP4_HUMAN - MeCP2 | −1.8237042 | 0.0014026 |
| 105 - 164 | N105 | C164 | MBD2_HUMAN - | −1.8260049 | 1.39E−04 |
| | | | SIR5_HUMAN | | |
| 167 - 32 | N167 | C32 | EHMT1_HUMAN - | −1.8264081 | 4.61E−04 |
| | | | Gilbert_Lab_CRISPRi_KRAB | | |
| 3 - 7 | N3 | C7 | HDAC3 - ZNF10 | −1.8272905 | 4.71E−04 |
| 3 - 246 | N3 | C246 | HDAC3 - ATRX_HUMAN | −1.8280097 | 4.32E−06 |
| 189 - 105 | N189 | C105 | ING2_HUMAN - | −1.8285478 | 1.66E−06 |
| | | | MBD2_HUMAN | | |
| 85 - 191 | N85 | C191 | SMYD3_HUMAN - | −1.8318818 | 0.00532482 |
| | | | CDYL_HUMAN | | |
| 6 - 298 | N6 | C298 | KDM1A - MBD2b | −1.8406659 | 2.76E−05 |
| 245 - 191 | N245 | C191 | TYY1_HUMAN - | −1.8425679 | 0.00324622 |
| | | | CDYL_HUMAN | | |
| 196 - 68 | N196 | C68 | MTA1_HUMAN - | −1.8437045 | 0.00114779 |
| | | | MBD3_HUMAN | | |
| 268 - 152 | N268 | C152 | FOXA1-Cterm - | −1.8438268 | 7.29E−04 |
| | | | CDY1_HUMAN | | |
| 289 - 341 | N289 | C341 | FOG1 - NCOR2_HUMAN | −1.84383 | 0.00341678 |
| 324 - 55 | N324 | C55 | LBR_HUMAN - | −1.8443883 | 0.01598442 |
| | | | RBBP4_HUMAN | | |
| 341 - 26 | N341 | C26 | NCOR2_HUMAN - EZH1 | −1.8471271 | 0.0015354 |
| 3 - 251 | N3 | C251 | HDAC3 - HCFC1_HUMAN | −1.8512402 | 0.00252777 |
| 105 - 37 | N105 | C37 | MBD2_HUMAN - KDM6A | −1.8520786 | 0.0059323 |
| 298 - 26 | N298 | C26 | MBD2b - EZH1 | −1.8530373 | 1.19E−05 |
| 74 - 298 | N74 | C298 | KDM5D_HUMAN - MBD2b | −1.8537245 | 8.64E−04 |
| 267 - 32 | N267 | C32 | FOXA1-Nterm - | −1.8548285 | 8.97E−04 |
| | | | Gilbert_Lab_CRISPRi_KRAB | | |
| 88 - 293 | N88 | C293 | ING4_HUMAN - KRAB- | −1.855084 | 3.11E−05 |
| | | | MeCP2 | | |
| 165 - 332 | N165 | C332 | MTA2_HUMAN - hs_SIRT5 | −1.8554856 | 3.92E−04 |
| 165 - 187 | N165 | C187 | MTA2_HUMAN - | −1.8561063 | 3.73E−04 |
| | | | MBD4_HUMAN | | |
| 186 - 306 | N186 | C306 | RIOX2_HUMAN - CobB | −1.8563131 | 5.39E−05 |
| 182 - 1 | N182 | C1 | MTA3_HUMAN - SETD1A | −1.8566471 | 3.36E−05 |
| 67 - 51 | N67 | C51 | PRDM9_HUMAN - | −1.8572931 | 0.01207509 |
| | | | UCHL5_HUMAN | | |
| 196 - 290 | N196 | C290 | MTA1_HUMAN - HP1aCS | −1.8603005 | 7.54E−05 |
| 174 - 299 | N174 | C299 | HDAC1_HUMAN - HST2 | −1.8606484 | 0.00945952 |
| 3 - 47 | N3 | C47 | HDAC3 - ANM2_HUMAN | −1.8613124 | 0.01465587 |
| 298 - 138 | N298 | C138 | MBD2b - TFPT_HUMAN | −1.8617129 | 9.30E−04 |
| 241 - 105 | N241 | C105 | SIR2_HUMAN - | −1.8623703 | 2.02E−04 |
| | | | MBD2_HUMAN | | |
| 215 - 222 | N215 | C222 | HDAC4_HUMAN - | −1.8627296 | 2.82E−04 |
| | | | IN80E_HUMAN | | |
| 345 - 298 | N345 | C298 | MSX2_HUMAN - MBD2b | −1.8630981 | 1.02E−05 |
| 327 - 298 | N327 | C298 | hs_NIPP1 - MBD2b | −1.8637975 | 0.00455913 |
| 297 - 298 | N297 | C298 | MesoLo - MBD2b | −1.8643211 | 2.27E−05 |
| 341 - 272 | N341 | C272 | NCOR2_HUMAN - Sir2 | −1.8655745 | 0.00128855 |
| 3 - 32 | N3 | C32 | HDAC3 - | −1.8677207 | 2.46E−05 |
| | | | Gilbert_Lab_CRISPRi_KRAB | | |
| 105 - 239 | N105 | C239 | MBD2_HUMAN - | −1.8677477 | 1.67E−04 |
| | | | KDM8_HUMAN | | |
| 252 - 298 | N252 | C298 | HCFC1_HUMAN - MBD2b | −1.868141 | 0.00211183 |
| 207 - 298 | N207 | C298 | KDM1B_HUMAN - MBD2b | −1.8700982 | 0.00701019 |
| 126 - 314 | N126 | C314 | SETMR_HUMAN - MeCP2 | −1.8710376 | 0.00293877 |
| 105 - 313 | N105 | C313 | MBD2_HUMAN - SaII | −1.871533 | 5.78E−04 |
| 245 - 105 | N245 | C105 | TYY1_HUMAN - | −1.8716108 | 1.32E−06 |
| | | | MBD2_HUMAN | | |
| 280 - 105 | N280 | C105 | CBF1-Cterm - | −1.8717164 | 1.20E−05 |
| | | | MBD2_HUMAN | | |
| 155 - 298 | N155 | C298 | NSD2_HUMAN - MBD2b | −1.8725842 | 1.59E−04 |
| 268 - 68 | N268 | C68 | FOXA1-Cterm - | −1.8754 | 5.09E−07 |
| | | | MBD3_HUMAN | | |
| 6 - 105 | N6 | C105 | KDM1A - MBD2_HUMAN | −1.8760702 | 6.09E−04 |
| 306 - 331 | N306 | C331 | CobB - mm_G9a | −1.876501 | 0.01091222 |
| 119 - 97 | N119 | C97 | ACL6A_HUMAN - | −1.878277 | 0.0135804 |
| | | | CHD3_HUMAN | | |
| 148 - 306 | N148 | C306 | NSD3_HUMAN - CobB | −1.8784594 | 4.39E−04 |
| 182 - 313 | N182 | C313 | MTA3_HUMAN - SaII | −1.8790123 | 1.25E−06 |
| 55 - 214 | N55 | C214 | RBBP4_HUMAN - | −1.8809083 | 6.91E−05 |
| | | | HDAC4_HUMAN | | |
| 57 - 298 | N57 | C298 | ANM8_HUMAN - MBD2b | −1.8813024 | 0.00266648 |
| 151 - 105 | N151 | C105 | SIR7_HUMAN - | −1.8814835 | 8.20E−06 |
| | | | MBD2_HUMAN | | |
| 32 - 131 | N32 | C131 | Gilbert_Lab_CRISPRi_KRAB - | −1.8821154 | 3.92E−04 |
| | | | PRDM2_HUMAN | | |
| 64 - 165 | N64 | C165 | HDAC2_HUMAN - | −1.8824843 | 0.00558604 |
| | | | MTA2_HUMAN | | |
| 189 - 215 | N189 | C215 | ING2_HUMAN - | −1.8828481 | 6.58E−04 |
| | | | HDAC4_HUMAN | | |
| 322 - 68 | N322 | C68 | MINT_HUMAN - | −1.8829068 | 1.35E−05 |
| | | | MBD3_HUMAN | | |
| 257 - 191 | N257 | C191 | c-Myb-TAD - | −1.8831507 | 3.96E−05 |
| | | | CDYL_HUMAN | | |
| 3 - 315 | N3 | C315 | HDAC3 - NCoR | −1.8853702 | 1.60E−07 |
| 245 - 293 | N245 | C293 | TYY1_HUMAN - KRAB- | −1.8865063 | 4.58E−04 |
| | | | MeCP2 | | |
| 327 - 105 | N327 | C105 | hs_NIPP1 - MBD2_HUMAN | −1.8875142 | 1.94E−04 |
| 105 - 25 | N105 | C25 | MBD2_HUMAN - CTCFL | −1.891833 | 4.61E−05 |
| 341 - 267 | N341 | C267 | NCOR2_HUMAN - FOXA1- | −1.8925434 | 0.00584845 |
| | | | Nterm | | |
| 68 - 151 | N68 | C151 | MBD3_HUMAN - | −1.8945 | 0.00265178 |
| | | | SIR7_HUMAN | | |
| 142 - 32 | N142 | C32 | SMRC1_HUMAN - | −1.8960112 | 0.00109223 |
| | | | Gilbert_Lab_CRISPRi_KRAB | | |
| 105 - 68 | N105 | C68 | MBD2_HUMAN - | −1.8963447 | 1.81E−04 |
| | | | MBD3_HUMAN | | |
| 298 - 68 | N298 | C68 | MBD2b - MBD3_HUMAN | −1.8969515 | 1.09E−05 |
| 78 - 105 | N78 | C105 | KAT6A_HUMAN - | −1.897362 | 1.01E−04 |
| | | | MBD2_HUMAN | | |
| 196 - 25 | N196 | C25 | MTA1_HUMAN - CTCFL | −1.8977252 | 0.00731339 |
| 55 - 315 | N55 | C315 | RBBP4_HUMAN - NCoR | −1.8994357 | 1.64E−07 |
| 272 - 105 | N272 | C105 | Sir2 - MBD2_HUMAN | −1.9038751 | 0.0101961 |
| 17 - 32 | N17 | C32 | EZH2 - | −1.9047861 | 0.00130615 |
| | | | Gilbert_Lab_CRISPRi_KRAB | | |
| 314 - 306 | N314 | C306 | MeCP2 - CobB | −1.904982 | 6.58E−05 |
| 3 - 201 | N3 | C201 | HDAC3 - KDM2B_HUMAN | −1.9100751 | 0.00291319 |
| 295 - 105 | N295 | C105 | SET-TAF1B - | −1.9115055 | 2.43E−07 |
| | | | MBD2_HUMAN | | |
| 245 - 298 | N245 | C298 | TYY1_HUMAN - MBD2b | −1.9144838 | 1.07E−05 |
| 300 - 152 | N300 | C152 | SIRT6 - CDY1_HUMAN | −1.9153103 | 0.00478733 |
| 233 - 191 | N233 | C191 | HINFP_HUMAN - | −1.9169232 | 5.06E−04 |
| | | | CDYL_HUMAN | | |
| 55 - 25 | N55 | C25 | RBBP4_HUMAN - CTCFL | −1.9171611 | 4.14E−06 |
| 25 - 105 | N25 | C105 | CTCFL - MBD2_HUMAN | −1.9178454 | 1.65E−05 |
| 48 - 55 | N48 | C55 | SETD5_HUMAN - | −1.9211877 | 0.00608182 |
| | | | RBBP4_HUMAN | | |
| 105 - 7 | N105 | C7 | MBD2_HUMAN - ZNF10 | −1.9212554 | 1.48E−05 |
| 110 - 105 | N110 | C105 | JMJD4_HUMAN - | −1.9277906 | 0.00217615 |
| | | | MBD2_HUMAN | | |
| 215 - 328 | N215 | C328 | HDAC4_HUMAN - | −1.9288735 | 0.00210614 |
| | | | hs_PHF19 | | |
| 105 - 299 | N105 | C299 | MBD2_HUMAN - HST2 | −1.9290039 | 1.46E−07 |
| 105 - 190 | N105 | C190 | MBD2_HUMAN - | −1.9298206 | 2.04E−06 |
| | | | ANM1_HUMAN | | |
| 165 - 73 | N165 | C73 | MTA2_HUMAN - | −1.9304884 | 1.71E−05 |
| | | | KDM5D_HUMAN | | |
| 246 - 298 | N246 | C298 | ATRX_HUMAN - MBD2b | −1.9309873 | 3.84E−07 |
| 3 - 268 | N3 | C268 | HDAC3 - FOXA1-Cterm | −1.9328004 | 0.00468812 |
| 165 - 205 | N165 | C205 | MTA2_HUMAN - | −1.9352289 | 0.00804628 |
| | | | JMJD7_HUMAN | | |
| 5 - 298 | N5 | C298 | KDM1A - MBD2b | −1.9361787 | 1.32E−06 |
| 32 - 105 | N32 | C105 | Gilbert_Lab_CRISPRi_KRAB - | −1.9374643 | 4.93E−05 |
| | | | MBD2_HUMAN | | |
| 190 - 298 | N190 | C298 | ANM1_HUMAN - MBD2b | −1.9382499 | 0.00209184 |
| 329 - 131 | N329 | C131 | pbcv1_vSET - | −1.9392633 | 0.00316252 |
| | | | PRDM2_HUMAN | | |
| 182 - 311 | N182 | C311 | MTA3_HUMAN - Sin3a | −1.9396987 | 0.00193314 |
| 64 - 152 | N64 | C152 | HDAC2_HUMAN - | −1.9405868 | 0.00772641 |
| | | | CDY1_HUMAN | | |
| 68 - 69 | N68 | C69 | MBD3_HUMAN - | −1.9410448 | 6.81E−06 |
| | | | SETB2_HUMAN | | |
| 165 - 320 | N165 | C320 | MTA2_HUMAN - mMLL3- | −1.9416752 | 7.67E−06 |
| | | | SET | | |
| 105 - 106 | N105 | C106 | MBD2_HUMAN - | −1.9446683 | 3.39E−08 |
| | | | KAT6B_HUMAN | | |
| 32 - 256 | N32 | C256 | Gilbert_Lab_CRISPRi_KRAB - | −1.9458572 | 0.00218686 |
| | | | LSD1-ORF | | |
| 105 - 332 | N105 | C332 | MBD2_HUMAN - hs_SIRT5 | −1.9472305 | 2.72E−04 |
| 165 - 8 | N165 | C8 | MTA2_HUMAN - MECP2 | −1.9505133 | 0.00811368 |
| 85 - 105 | N85 | C105 | SMYD3_HUMAN - | −1.9505455 | 1.95E−04 |
| | | | MBD2_HUMAN | | |
| 196 - 106 | N196 | C106 | MTA1_HUMAN - | −1.9572083 | 4.62E−05 |
| | | | KAT6B_HUMAN | | |
| 196 - 308 | N196 | C308 | MTA1_HUMAN - HDT1 | −1.9572367 | 0.00180054 |
| 165 - 315 | N165 | C315 | MTA2_HUMAN - NCoR | −1.9586337 | 3.88E−04 |
| 15 - 105 | N15 | C105 | EP300 - MBD2_HUMAN | −1.9591003 | 2.12E−05 |
| 215 - 301 | N215 | C301 | HDAC4_HUMAN - SIRT3 | −1.9606659 | 6.87E−05 |
| 105 - 153 | N105 | C153 | MBD2_HUMAN - | −1.9619113 | 1.19E−04 |
| | | | KAT7_HUMAN | | |
| 32 - 298 | N32 | C298 | Gilbert_Lab_CRISPRi_KRAB - | −1.9672005 | 1.62E−05 |
| | | | MBD2b | | |
| 105 - 12 | N105 | C12 | MBD2_HUMAN - KMT2A | −1.9682314 | 1.56E−06 |
| 164 - 298 | N164 | C298 | SIR5_HUMAN - MBD2b | −1.9687205 | 1.33E−05 |
| 298 - 1 | N298 | C1 | MBD2b - SETD1A | −1.9708924 | 1.76E−04 |
| 215 - 149 | N215 | C149 | HDAC4_HUMAN - | −1.9740108 | 3.79E−04 |
| | | | MBD1_HUMAN | | |
| 298 - 294 | N298 | C294 | MBD2b - DIM5 | −1.9751086 | 6.21E−06 |
| 55 - 327 | N55 | C327 | RBBP4_HUMAN - hs_NIPP1 | −1.9751995 | 3.06E−06 |
| 64 - 105 | N64 | C105 | HDAC2_HUMAN - | −1.9774131 | 2.98E−06 |
| | | | MBD2_HUMAN | | |
| 3 - 8 | N3 | C8 | HDAC3 - MECP2 | −1.9782591 | 2.65E−06 |
| 202 - 327 | N202 | C327 | KDM2B_HUMAN - | −1.9785724 | 4.01E−04 |
| | | | hs_NIPP1 | | |
| 3 - 165 | N3 | C165 | HDAC3 - MTA2_HUMAN | −1.9835554 | 0.00469714 |
| 78 - 298 | N78 | C298 | KAT6A_HUMAN - MBD2b | −1.9844355 | 3.80E−07 |
| 298 - 61 | N298 | C61 | MBD2b - HAT1_HUMAN | −1.9847232 | 9.04E−04 |
| 257 - 298 | N257 | C298 | c-Myb-TAD - MBD2b | −1.9903244 | 6.23E−05 |
| 182 - 310 | N182 | C310 | MTA3_HUMAN - TgSET8 | −1.9905717 | 1.19E−04 |
| 105 - 38 | N105 | C38 | MBD2_HUMAN - EHMT2 | −1.9916421 | 3.13E−04 |
| 105 - 185 | N105 | C185 | MBD2_HUMAN - | −1.9934366 | 2.12E−04 |
| | | | RBBP7_HUMAN | | |
| 75 - 70 | N75 | C70 | KDM5D_HUMAN - | −1.9938195 | 0.01107021 |
| | | | SETB2_HUMAN | | |
| 182 - 55 | N182 | C55 | MTA3_HUMAN - | −1.9940704 | 5.90E−04 |
| | | | RBBP4_HUMAN | | |
| 77 - 68 | N77 | C68 | KDM5D_HUMAN - | −1.9952461 | 1.31E−05 |
| | | | MBD3_HUMAN | | |
| 173 - 298 | N173 | C298 | SIR4_HUMAN - MBD2b | −1.99574 | 6.10E−04 |
| 310 - 105 | N310 | C105 | TgSET8 - MBD2_HUMAN | −1.9970482 | 3.60E−07 |
| 69 - 293 | N69 | C293 | SETB2_HUMAN - KRAB- | −1.9991525 | 5.60E−04 |
| | | | MeCP2 | | |
| 315 - 298 | N315 | C298 | NCoR - MBD2b | −2.0000418 | 1.71E−06 |
| 195 - 105 | N195 | C105 | SETD3_HUMAN - | −2.0002009 | 1.13E−04 |
| | | | MBD2_HUMAN | | |
| 215 - 268 | N215 | C268 | HDAC4_HUMAN - FOXA1- | −2.0022858 | 2.20E−04 |
| | | | Cterm | | |
| 165 - 123 | N165 | C123 | MTA2_HUMAN - | −2.0028676 | 0.00576643 |
| | | | KMT2A_HUMAN | | |
| 105 - 128 | N105 | C128 | MBD2_HUMAN - | −2.0038167 | 4.98E−04 |
| | | | HAIR_HUMAN | | |
| 3 - 68 | N3 | C68 | HDAC3 - MBD3_HUMAN | −2.0086647 | 8.47E−08 |
| 344 - 239 | N344 | C239 | HDAC3_HUMAN - | −2.0103825 | 0.00448274 |
| | | | KDM8_HUMAN | | |
| 182 - 346 | N182 | C346 | MTA3_HUMAN - | −2.0120241 | 7.90E−05 |
| | | | MSX2_HUMAN | | |
| 182 - 332 | N182 | C332 | MTA3_HUMAN - hs_SIRT5 | −2.0130506 | 6.11E−05 |
| 61 - 105 | N61 | C105 | HAT1_HUMAN - | −2.0142415 | 2.26E−04 |
| | | | MBD2_HUMAN | | |
| 233 - 215 | N233 | C215 | HINFP_HUMAN - | −2.0145665 | 1.52E−05 |
| | | | HDAC4_HUMAN | | |
| 138 - 298 | N138 | C298 | TFPT_HUMAN - MBD2b | −2.0149919 | 0.00162101 |
| 105 - 63 | N105 | C63 | MBD2_HUMAN - | −2.0213373 | 1.01E−04 |
| | | | SMYD5_HUMAN | | |
| 241 - 68 | N241 | C68 | SIR2_HUMAN - | −2.0216606 | 4.33E−06 |
| | | | MBD3_HUMAN | | |
| 298 - 233 | N298 | C233 | MBD2b - HINFP_HUMAN | −2.0253903 | 2.08E−05 |
| 298 - 308 | N298 | C308 | MBD2b - HDT1 | −2.0275443 | 4.64E−05 |
| 68 - 314 | N68 | C314 | MBD3_HUMAN - MeCP2 | −2.0278708 | 5.44E−07 |
| 186 - 105 | N186 | C105 | RIOX2_HUMAN - | −2.028462 | 2.26E−05 |
| | | | MBD2_HUMAN | | |
| 298 - 204 | N298 | C204 | MBD2b - HIF1N_HUMAN | −2.02942 | 2.65E−05 |
| 55 - 298 | N55 | C298 | RBBP4_HUMAN - MBD2b | −2.0321874 | 7.42E−08 |
| 12 - 293 | N12 | C293 | KMT2A - KRAB-MeCP2 | −2.0322965 | 6.06E−04 |
| 5 - 341 | N5 | C341 | KDM1A - NCOR2_HUMAN | −2.0327574 | 0.0012255 |
| 293 - 32 | N293 | C32 | KRAB-MeCP2 - | −2.0345597 | 9.08E−06 |
| | | | Gilbert_Lab_CRISPRi_KRAB | | |
| 298 - 116 | N298 | C116 | MBD2b - ANM6_HUMAN | −2.0372938 | 6.71E−04 |
| 3 - 105 | N3 | C105 | HDAC3 - MBD2_HUMAN | −2.0381299 | 1.09E−05 |
| 105 - 186 | N105 | C186 | MBD2_HUMAN - | −2.040693 | 1.02E−05 |
| | | | RIOX2_HUMAN | | |
| 106 - 32 | N106 | C32 | KAT6B_HUMAN - | −2.0414366 | 7.71E−05 |
| | | | Gilbert_Lab_CRISPRi_KRAB | | |
| 233 - 105 | N233 | C105 | HINFP_HUMAN - | −2.0484098 | 4.04E−06 |
| | | | MBD2_HUMAN | | |
| 165 - 68 | N165 | C68 | MTA2_HUMAN - | −2.0491263 | 2.79E−04 |
| | | | MBD3_HUMAN | | |
| 219 - 298 | N219 | C298 | JARD2_HUMAN - MBD2b | −2.0497392 | 4.54E−04 |
| 263 - 298 | N263 | C298 | HDAC8 - MBD2b | −2.0508585 | 2.77E−05 |
| 27 - 105 | N27 | C105 | EZH1 - MBD2_HUMAN | −2.0514323 | 6.52E−05 |
| 298 - 130 | N298 | C130 | MBD2b - PRDM2_HUMAN | −2.051775 | 0.00331916 |
| 1 - 298 | N1 | C298 | SETD1A - MBD2b | −2.0524522 | 1.36E−05 |
| 3 - 149 | N3 | C149 | HDAC3 - MBD1_HUMAN | −2.0525566 | 4.99E−05 |
| 298 - 69 | N298 | C69 | MBD2b - SETB2_HUMAN | −2.0536159 | 7.75E−04 |
| 68 - 78 | N68 | C78 | MBD3_HUMAN - | −2.0550407 | 8.73E−04 |
| | | | KAT6A_HUMAN | | |
| 111 - 298 | N111 | C298 | KDM5A_HUMAN - MBD2b | −2.0557073 | 7.15E−06 |
| 154 - 105 | N154 | C105 | NSD2_HUMAN - | −2.057568 | 1.76E−06 |
| | | | MBD2_HUMAN | | |
| 196 - 222 | N196 | C222 | MTA1_HUMAN - | −2.058457 | 0.00109409 |
| | | | IN80E_HUMAN | | |
| 73 - 105 | N73 | C105 | KDM5D_HUMAN - | −2.0586244 | 4.23E−06 |
| | | | MBD2_HUMAN | | |
| 306 - 215 | N306 | C215 | CobB - HDAC4_HUMAN | −2.0595322 | 2.30E−04 |
| 339 - 298 | N339 | C298 | SPOC1_HUMAN - MBD2b | −2.0643639 | 0.00118319 |
| 112 - 275 | N112 | C275 | KDM5A_HUMAN - DOT1L- | −2.0650804 | 0.00131473 |
| | | | DOT1_domain | | |
| 332 - 202 | N332 | C202 | hs_SIRT5 - | −2.0663771 | 0.00400583 |
| | | | KDM2B_HUMAN | | |
| 105 - 9 | N105 | C9 | MBD2_HUMAN - MECP2 | −2.0718366 | 1.83E−04 |
| 196 - 164 | N196 | C164 | MTA1_HUMAN - | −2.0821965 | 0.00361066 |
| | | | SIR5_HUMAN | | |
| 55 - 105 | N55 | C105 | RBBP4_HUMAN - | −2.0838447 | 2.29E−08 |
| | | | MBD2_HUMAN | | |
| 165 - 12 | N165 | C12 | MTA2_HUMAN - KMT2A | −2.0847835 | 1.28E−04 |
| 196 - 315 | N196 | C315 | MTA1_HUMAN - NCoR | −2.0850156 | 1.70E−05 |
| 194 - 105 | N194 | C105 | ING1_HUMAN - | −2.0857433 | 1.91E−04 |
| | | | MBD2_HUMAN | | |
| 246 - 293 | N246 | C293 | ATRX_HUMAN - KRAB- | −2.0866057 | 4.93E−04 |
| | | | MeCP2 | | |
| 306 - 196 | N306 | C196 | CobB - MTA1_HUMAN | −2.0867307 | 0.00417878 |
| 106 - 298 | N106 | C298 | KAT6B_HUMAN - MBD2b | −2.0887381 | 8.96E−08 |
| 341 - 8 | N341 | C8 | NCOR2_HUMAN - MECP2 | −2.0909555 | 9.40E−06 |
| 280 - 341 | N280 | C341 | CBF1-Cterm - | −2.0919403 | 0.00381003 |
| | | | NCOR2_HUMAN | | |
| 196 - 310 | N196 | C310 | MTA1_HUMAN - TgSET8 | −2.0951695 | 0.00194682 |
| 166 - 105 | N166 | C105 | EHMT1_HUMAN - | −2.0953492 | 3.57E−04 |
| | | | MBD2_HUMAN | | |
| 69 - 105 | N69 | C105 | SETB2_HUMAN - | −2.0955902 | 1.23E−07 |
| | | | MBD2_HUMAN | | |
| 215 - 130 | N215 | C130 | HDAC4_HUMAN - | −2.0981368 | 2.89E−04 |
| | | | PRDM2_HUMAN | | |
| 215 - 1 | N215 | C1 | HDAC4_HUMAN - SETD1A | −2.099548 | 1.68E−04 |
| 196 - 1 | N196 | C1 | MTA1_HUMAN - SETD1A | −2.1019872 | 1.10E−07 |
| 257 - 293 | N257 | C293 | c-Myb-TAD - KRAB-MeCP2 | −2.112451 | 1.67E−07 |
| 306 - 47 | N306 | C47 | CobB - ANM2_HUMAN | −2.1126245 | 0.00164965 |
| 196 - 149 | N196 | C149 | MTA1_HUMAN - | −2.1197293 | 8.58E−04 |
| | | | MBD1_HUMAN | | |
| 298 - 135 | N298 | C135 | MBD2b - KDM2A_HUMAN | −2.1209024 | 1.56E−04 |
| 215 -202 | N215 | C202 | HDAC4_HUMAN - | −2.1221753 | 2.80E−04 |
| | | | KDM2B_HUMAN | | |
| 297 - 215 | N297 | C215 | MesoLo - HDAC4_HUMAN | −2.1228409 | 3.42E−04 |
| 218 - 105 | N218 | C105 | IN80B_HUMAN - | −2.1326237 | 4.03E−05 |
| | | | MBD2_HUMAN | | |
| 212 - 298 | N212 | C298 | HDAC8_HUMAN - MBD2b | −2.1338436 | 1.88E−04 |
| 55 - 204 | N55 | C204 | RBBP4_HUMAN - | −2.1361922 | 9.91E−05 |
| | | | HIF1N_HUMAN | | |
| 255 - 298 | N255 | C298 | EED_HUMAN - MBD2b | −2.1366265 | 1.55E−05 |
| 25 - 298 | N25 | C298 | CTCFL - MBD2b | −2.1424299 | 2.42E−06 |
| 227 - 68 | N227 | C68 | SIR1_HUMAN - | −2.1449952 | 0.00326434 |
| | | | MBD3_HUMAN | | |
| 68 - 1 | N68 | C1 | MBD3_HUMAN - SETD1A | −2.1456674 | 1.91E−04 |
| 182 - 116 | N182 | C116 | MTA3_HUMAN - | −2.1536282 | 0.00261348 |
| | | | ANM6_HUMAN | | |
| 298 - 148 | N298 | C148 | MBD2b - NSD3_HUMAN | −2.1556426 | 4.43E−05 |
| 105 - 233 | N105 | C233 | MBD2_HUMAN - | −2.1564961 | 1.34E−05 |
| | | | HINFP_HUMAN | | |
| 182 - 214 | N182 | C214 | MTA3_HUMAN - | −2.1644647 | 5.21E−04 |
| | | | HDAC4_HUMAN | | |
| 165 - 164 | N165 | C164 | MTA2_HUMAN - | −2.1645229 | 4.27E−04 |
| | | | SIR5_HUMAN | | |
| 165 - 116 | N165 | C116 | MTA2_HUMAN - | −2.1654076 | 2.57E−04 |
| | | | ANM6_HUMAN | | |
| 215 - 110 | N215 | C110 | HDAC4_HUMAN - | −2.1673818 | 0.00122431 |
| | | | JMJD4_HUMAN | | |
| 341 - 290 | N341 | C290 | NCOR2_HUMAN - HP1aCS | −2.1686797 | 7.44E−06 |
| 105 - 134 | N105 | C134 | MBD2_HUMAN - | −2.1687271 | 5.28E−05 |
| | | | KDM2A_HUMAN | | |
| 25 - 293 | N25 | C293 | CTCFL - KRAB-MeCP2 | −2.1697219 | 3.02E−04 |
| 241 - 191 | N241 | C191 | SIR2_HUMAN - | −2.1702955 | 0.00194052 |
| | | | CDYL_HUMAN | | |
| 341 - 32 | N341 | C32 | NCOR2_HUMAN - | −2.172743 | 3.35E−05 |
| | | | Gilbert_Lab_CRISPRi_KRAB | | |
| 215 - 20 | N215 | C20 | HDAC4_HUMAN - KDM1B | −2.1784094 | 6.57E−04 |
| 299 - 105 | N299 | C105 | HST2 - MBD2_HUMAN | −2.178972 | 4.95E−08 |
| 77 - 298 | N77 | C298 | KDM5D_HUMAN - MBD2b | −2.1802591 | 7.54E−06 |
| 73 - 165 | N73 | C165 | KDM5D_HUMAN - | −2.1810421 | 4.21E−05 |
| | | | MTA2_HUMAN | | |
| 298 - 295 | N298 | C295 | MBD2b - SET-TAF1B | −2.1852432 | 6.00E−04 |
| 212 - 105 | N212 | C105 | HDAC8_HUMAN - | −2.1886048 | 2.11E−05 |
| | | | MBD2_HUMAN | | |
| 306 - 298 | N306 | C298 | CobB - MBD2b | −2.1937623 | 3.05E−08 |
| 165 - 311 | N165 | C311 | MTA2_HUMAN - Sin3a | −2.1957418 | 0.00157958 |
| 298 - 15 | N298 | C15 | MBD2b - EP300 | −2.1975726 | 8.78E−05 |
| 298 - 307 | N298 | C307 | MBD2b - KYP | −2.1982983 | 3.81E−06 |
| 299 - 215 | N299 | C215 | HST2 - HDAC4_HUMAN | −2.2005603 | 0.00110841 |
| 196 - 217 | N196 | C217 | MTA1_HUMAN - | −2.2027484 | 3.35E−04 |
| | | | CHRC1_HUMAN | | |
| 32 - 165 | N32 | C165 | Gilbert_Lab_CRISPRi_KRAB - | −2.2037265 | 6.83E−06 |
| | | | MTA2_HUMAN | | |
| 164 - 293 | N164 | C293 | SIR5_HUMAN - KRAB- | −2.2046852 | 8.17E−04 |
| | | | MeCP2 | | |
| 188 - 298 | N188 | C298 | SMYD4_HUMAN - MBD2b | −2.2065404 | 1.13E−05 |
| 196 - 88 | N196 | C88 | MTA1_HUMAN - | −2.2069533 | 0.00184046 |
| | | | ING4_HUMAN | | |
| 322 - 105 | N322 | C105 | MINT_HUMAN - | −2.2094368 | 2.00E−06 |
| | | | MBD2_HUMAN | | |
| 105 - 202 | N105 | C202 | MBD2_HUMAN - | −2.2129549 | 2.92E−05 |
| | | | KDM2B_HUMAN | | |
| 165 - 346 | N165 | C346 | MTA2_HUMAN - | −2.2169236 | 1.33E−05 |
| | | | MSX2_HUMAN | | |
| 25 - 191 | N25 | C191 | CTCFL - CDYL_HUMAN | −2.2189909 | 3.33E−06 |
| 165 - 334 | N165 | C334 | MTA2_HUMAN - | −2.219871 | 7.27E−05 |
| | | | hs_RCOR1 | | |
| 55 - 306 | N55 | C306 | RBBP4_HUMAN - CobB | −2.2219641 | 2.89E−06 |
| 105 - 334 | N105 | C334 | MBD2_HUMAN - | −2.2242821 | 4.42E−07 |
| | | | hs_RCOR1 | | |
| 174 - 298 | N174 | C298 | HDAC1_HUMAN - MBD2b | −2.2292442 | 1.96E−05 |
| 228 - 332 | N228 | C332 | HDAC7_HUMAN - | −2.230855 | 0.0022546 |
| | | | hs_SIRT5 | | |
| 215 - 246 | N215 | C246 | HDAC4_HUMAN - | −2.2321704 | 3.05E−05 |
| | | | ATRX_HUMAN | | |
| 55 - 293 | N55 | C293 | RBBP4_HUMAN - KRAB- | −2.23664 | 4.89E−04 |
| | | | MeCP2 | | |
| 68 - 306 | N68 | C306 | MBD3_HUMAN - CobB | −2.2386403 | 6.28E−06 |
| 105 - 182 | N105 | C182 | MBD2_HUMAN - | −2.2431825 | 9.44E−05 |
| | | | MTA3_HUMAN | | |
| 165 - 105 | N165 | C105 | MTA2_HUMAN - | −2.2469327 | 1.67E−07 |
| | | | MBD2_HUMAN | | |
| 1 - 105 | N1 | C105 | SETD1A - MBD2_HUMAN | −2.2490233 | 1.97E−06 |
| 332 - 215 | N332 | C215 | hs_SIRT5 - | −2.2491345 | 0.00139411 |
| | | | HDAC4_HUMAN | | |
| 322 - 32 | N322 | C32 | MINT_HUMAN - | −2.2518052 | 4.40E−06 |
| | | | Gilbert_Lab_CRISPRi_KRAB | | |
| 69 - 298 | N69 | C298 | SETB2_HUMAN - MBD2b | −2.2526909 | 2.29E−07 |
| 306 - 105 | N306 | C105 | CobB - MBD2_HUMAN | −2.2540561 | 4.65E−09 |
| 68 - 105 | N68 | C105 | MBD3_HUMAN - | −2.2583141 | 1.95E−08 |
| | | | MBD2_HUMAN | | |
| 165 - 69 | N165 | C69 | MTA2_HUMAN - | −2.260498 | 4.17E−05 |
| | | | SETB2_HUMAN | | |
| 78 - 32 | N78 | C32 | KAT6A_HUMAN - | −2.2630791 | 4.76E−05 |
| | | | Gilbert_Lab_CRISPRi_KRAB | | |
| 215 - 190 | N215 | C190 | HDAC4_HUMAN - | −2.2646455 | 8.84E−04 |
| | | | ANM1_HUMAN | | |
| 306 - 182 | N306 | C182 | CobB - MTA3_HUMAN | −2.2677323 | 4.07E−05 |
| 15 - 298 | N15 | C298 | EP300 - MBD2b | −2.2717177 | 4.46E−04 |
| 313 - 306 | N313 | C306 | SaII - CobB | −2.280951 | 1.49E−08 |
| 298 - 315 | N298 | C315 | MBD2b - NCoR | −2.2814258 | 2.85E−04 |
| 196 - 8 | N196 | C8 | MTA1_HUMAN - MECP2 | −2.2863473 | 2.53E−05 |
| 298 - 176 | N298 | C176 | MBD2b - ARP8_HUMAN | −2.2866391 | 0.00116264 |
| 215 - 73 | N215 | C73 | HDAC4_HUMAN - | −2.2942005 | 4.31E−04 |
| | | | KDM5D_HUMAN | | |
| 298 - 346 | N298 | C346 | MBD2b - MSX2_HUMAN | −2.2949378 | 2.98E−07 |
| 233 - 32 | N233 | C32 | HINFP_HUMAN - | −2.2966958 | 8.67E−05 |
| | | | Gilbert_Lab_CRISPRi_KRAB | | |
| 105 - 214 | N105 | C214 | MBD2_HUMAN - | −2.3057108 | 2.25E−04 |
| | | | HDAC4_HUMAN | | |
| 268 - 298 | N268 | C298 | FOXA1-Cterm - MBD2b | −2.3069994 | 6.23E−08 |
| 293 - 105 | N293 | C105 | KRAB-MeCP2 - | −2.3078913 | 4.80E−06 |
| | | | MBD2_HUMAN | | |
| 5 - 215 | N5 | C215 | KDM1A - HDAC4_HUMAN | −2.3083667 | 4.66E−04 |
| 105 - 17 | N105 | C17 | MBD2_HUMAN - EZH2 | −2.310123 | 4.74E−05 |
| 182 - 106 | N182 | C106 | MTA3_HUMAN - | −2.3103974 | 1.24E−05 |
| | | | KAT6B_HUMAN | | |
| 185 - 306 | N185 | C306 | RBBP7_HUMAN - CobB | −2.3140941 | 6.67E−05 |
| 118 - 293 | N118 | C293 | HDAC6_HUMAN - KRAB- | −2.3164315 | 2.79E−05 |
| | | | MeCP2 | | |
| 196 - 105 | N196 | C105 | MTA1_HUMAN - | −2.3197933 | 0.00156363 |
| | | | MBD2_HUMAN | | |
| 105 - 81 | N105 | C81 | MBD2_HUMAN - | −2.3209988 | 3.41E−04 |
| | | | NCOA3_HUMAN | | |
| 215 - 290 | N215 | C290 | HDAC4_HUMAN - HP1aCS | −2.329752 | 7.34E−06 |
| 215 - 280 | N215 | C280 | HDAC4_HUMAN - CBF1- | −2.3309558 | 2.05E−04 |
| | | | Cterm | | |
| 165 - 106 | N165 | C106 | MTA2_HUMAN - | −2.3316808 | 8.38E−05 |
| | | | KAT6B_HUMAN | | |
| 165 - 301 | N165 | C301 | MTA2_HUMAN - SIRT3 | −2.3334809 | 8.42E−04 |
| 256 - 186 | N256 | C186 | LSD1-ORF - | −2.3349822 | 0.00202194 |
| | | | RIOX2_HUMAN | | |
| 55 - 245 | N55 | C245 | RBBP4_HUMAN - | −2.3438901 | 6.89E−04 |
| | | | TYY1_HUMAN | | |
| 298 - 105 | N298 | C105 | MBD2b - MBD2_HUMAN | −2.3482267 | 4.23E−10 |
| 298 - 186 | N298 | C186 | MBD2b - RIOX2_HUMAN | −2.3601249 | 2.94E−05 |
| 215 -26 | N215 | C26 | HDAC4_HUMAN - EZH1 | −2.3658051 | 1.31E−07 |
| 215 - 315 | N215 | C315 | HDAC4_HUMAN - NCoR | −2.3676095 | 8.00E−05 |
| 105 - 120 | N105 | C120 | MBD2_HUMAN - | −2.3676896 | 3.31E−08 |
| | | | RING1_HUMAN | | |
| 165 - 313 | N165 | C313 | MTA2_HUMAN - SaII | −2.3689369 | 6.81E−04 |
| 196 - 5 | N196 | C5 | MTA1_HUMAN - KDM1A | −2.3711979 | 8.97E−04 |
| 287 - 131 | N287 | C131 | G9A[SET] - | −2.3729757 | 0.00167481 |
| | | | PRDM2_HUMAN | | |
| 298 - 280 | N298 | C280 | MBD2b - CBF1-Cterm | −2.374048 | 5.76E−04 |
| 346 - 293 | N346 | C293 | MSX2_HUMAN - KRAB- | −2.3836629 | 9.17E−08 |
| | | | MeCP2 | | |
| 68 - 32 | N68 | C32 | MBD3_HUMAN - | −2.3911476 | 4.79E−06 |
| | | | Gilbert_Lab_CRISPRi_KRAB | | |
| 166 - 298 | N166 | C298 | EHMT1_HUMAN - MBD2b | −2.3934243 | 9.87E−06 |
| | | | MBD2_HUMAN - | | |
| 105 - 78 | N105 | C78 | KAT6A_HUMAN | −2.401373 | 1.27E−08 |
| 313 - 215 | N313 | C215 | SaII - HDAC4_HUMAN | −2.4041577 | 5.35E−04 |
| 298 - 128 | N298 | C128 | MBD2b - HAIR_HUMAN | −2.416245 | 5.98E−06 |
| 196 - 241 | N196 | C241 | MTA1_HUMAN - | −2.4166364 | 4.41E−05 |
| | | | SIR2_HUMAN | | |
| 332 - 32 | N332 | C32 | hs_SIRT5 - | −2.4207498 | 1.57E−05 |
| | | | Gilbert_Lab_CRISPRi_KRAB | | |
| 88 - 341 | N88 | C341 | ING4_HUMAN - | −2.4347575 | 6.59E−05 |
| | | | NCOR2_HUMAN | | |
| 182 - 327 | N182 | C327 | MTA3_HUMAN - hs_NIPP1 | −2.4350487 | 1.07E−04 |
| 149 - 32 | N149 | C32 | MBD1_HUMAN - | −2.4355124 | 3.45E−07 |
| | | | Gilbert_Lab_CRISPRi_KRAB | | |
| 298 - 55 | N298 | C55 | MBD2b - RBBP4_HUMAN | −2.444322 | 8.07E−06 |
| 298 - 9 | N298 | C9 | MBD2b - MECP2 | −2.4501308 | 2.23E−05 |
| 64 - 298 | N64 | C298 | HDAC2_HUMAN - MBD2b | −2.4509012 | 1.31E−05 |
| 196 - 289 | N196 | C289 | MTA1_HUMAN - FOG1 | −2.4515801 | 5.41E−05 |
| 174 - 105 | N174 | C105 | HDAC1_HUMAN - | −2.4521282 | 4.55E−06 |
| | | | MBD2_HUMAN | | |
| 215 - 289 | N215 | C289 | HDAC4_HUMAN - FOG1 | −2.453865 | 1.83E−06 |
| 3 - 217 | N3 | C217 | HDAC3 - CHRC1_HUMAN | −2.4551324 | 1.26E−05 |
| 105 - 306 | N105 | C306 | MBD2_HUMAN - CobB | −2.4693319 | 1.53E−12 |
| 182 - 289 | N182 | C289 | MTA3_HUMAN - FOG1 | −2.4701994 | 6.13E−05 |
| 68 - 191 | N68 | C191 | MBD3_HUMAN - | −2.4718359 | 1.31E−05 |
| | | | CDYL_HUMAN | | |
| 228 - 111 | N228 | C111 | HDAC7_HUMAN - | −2.4782473 | 6.47E−05 |
| | | | KDM5A_HUMAN | | |
| 18 - 293 | N18 | C293 | EZH2 - KRAB-MeCP2 | −2.478558 | 6.30E−05 |
| 306 - 68 | N306 | C68 | CobB - MBD3_HUMAN | −2.4796141 | 5.03E−08 |
| 73 - 293 | N73 | C293 | KDM5D_HUMAN - KRAB- | −2.4899231 | 8.75E−07 |
| | | | MeCP2 | | |
| 151 - 293 | N151 | C293 | SIR7_HUMAN - KRAB- | −2.4932891 | 5.33E−08 |
| | | | MeCP2 | | |
| 268 - 32 | N268 | C32 | FOXA1-Cterm - | −2.4936815 | 1.24E−07 |
| | | | Gilbert_Lab_CRISPRi_KRAB | | |
| 135 - 68 | N135 | C68 | KDM2A_HUMAN - | −2.498604 | 2.49E−04 |
| | | | MBD3_HUMAN | | |
| 341 - 334 | N341 | C334 | NCOR2_HUMAN - | −2.4986048 | 1.61E−04 |
| | | | hs_RCOR1 | | |
| 298 - 332 | N298 | C332 | MBD2b - hs_SIRT5 | −2.5049211 | 7.25E−05 |
| 215 - 297 | N215 | C297 | HDAC4_HUMAN - MesoLo | −2.5054616 | 4.86E−05 |
| 241 - 293 | N241 | C293 | SIR2_HUMAN - KRAB- | −2.5070304 | 1.32E−04 |
| | | | MeCP2 | | |
| 298 - 214 | N298 | C214 | MBD2b - HDAC4_HUMAN | −2.5151914 | 1.74E−07 |
| 165 - 288 | N165 | C288 | MTA2_HUMAN - SUV[SET] | −2.530224 | 2.09E−05 |
| 328 - 293 | N328 | C293 | hs_PHF19 - KRAB-MeCP2 | −2.534127 | 7.90E−05 |
| 298 - 289 | N298 | C289 | MBD2b - FOG1 | −2.5395449 | 4.77E−05 |
| 298 - 290 | N298 | C290 | MBD2b - HP1aCS | −2.5406477 | 5.15E−08 |
| 87 - 298 | N87 | C298 | SETD7_HUMAN - MBD2b | −2.5409602 | 2.68E−07 |
| 111 - 105 | N111 | C105 | KDM5A_HUMAN - | −2.5437818 | 7.84E−07 |
| | | | MBD2_HUMAN | | |
| 317 - 298 | N317 | C298 | HDAC3 - MBD2b | −2.5453389 | 6.92E−08 |
| 298 - 327 | N298 | C327 | MBD2b - hs_NIPP1 | −2.5479678 | 1.28E−07 |
| 182 -306 | N182 | C306 | MTA3_HUMAN - CobB | −2.5766944 | 6.13E−07 |
| 241 - 298 | N241 | C298 | SIR2_HUMAN - MBD2b | −2.5887108 | 1.14E−08 |
| 25 - 165 | N25 | C165 | CTCFL - MTA2_HUMAN | −2.6001659 | 5.15E−05 |
| 105 - 315 | N105 | C315 | MBD2_HUMAN - NCoR | −2.6006607 | 1.10E−07 |
| 196 - 269 | N196 | C269 | MTA1_HUMAN - PU.1 | −2.6035475 | 6.87E−05 |
| 252 - 105 | N252 | C105 | HCFC1_HUMAN - | −2.6243908 | 1.46E−05 |
| | | | MBD2_HUMAN | | |
| 182 - 78 | N182 | C78 | MTA3_HUMAN - | −2.6434623 | 1.51E−05 |
| | | | KAT6A_HUMAN | | |
| 165 - 327 | N165 | C327 | MTA2_HUMAN - hs_NIPP1 | −2.664428 | 1.07E−06 |
| 55 - 32 | N55 | C32 | RBBP4_HUMAN - | −2.6666527 | 6.87E−07 |
| | | | Gilbert_Lab_CRISPRi_KRAB | | |
| 313 - 105 | N313 | C105 | SaII - MBD2_HUMAN | −2.67587 | 1.17E−08 |
| 313 - 191 | N313 | C191 | SaII - CDYL_HUMAN | −2.6991404 | 4.50E−06 |
| 313 - 55 | N313 | C55 | SaII - RBBP4_HUMAN | −2.6996559 | 4.23E−05 |
| 298 - 7 | N298 | C7 | MBD2b - ZNF10 | −2.7073988 | 3.18E−06 |
| 298 - 313 | N298 | C313 | MBD2b - SaII | −2.7419301 | 6.88E−06 |
| 313 - 256 | N313 | C256 | SaII - LSD1-ORF | −2.7634799 | 5.00E−06 |
| 222 - 293 | N222 | C293 | IN80E_HUMAN - KRAB- | −2.7712317 | 2.30E−06 |
| | | | MeCP2 | | |
| 327 - 32 | N327 | C32 | hs_NIPP1 - | −2.782958 | 3.00E−08 |
| | | | Gilbert_Lab_CRISPRi_KRAB | | |
| 105 - 298 | N105 | C298 | MBD2_HUMAN - MBD2b | −2.785728 | 6.03E−06 |
| 215 - 68 | N215 | C68 | HDAC4_HUMAN - | −2.7903857 | 2.84E−07 |
| | | | MBD3_HUMAN | | |
| 185 - 191 | N185 | C191 | RBBP7_HUMAN - | −2.8012281 | 4.44E−06 |
| | | | CDYL_HUMAN | | |
| 25 - 341 | N25 | C341 | CTCFL - NCOR2_HUMAN | −2.8088122 | 9.07E−07 |
| 131 - 105 | N131 | C105 | PRDM2_HUMAN - | −2.8337782 | 1.98E−09 |
| | | | MBD2_HUMAN | | |
| 306 - 32 | N306 | C32 | CobB - | −2.8641021 | 3.01E−10 |
| | | | Gilbert_Lab_CRISPRi_KRAB | | |
| 108 - 298 | N108 | C298 | KAT6B_HUMAN - MBD2b | −2.8785147 | 2.25E−05 |
| 298 - 293 | N298 | C293 | MBD2b - KRAB-MeCP2 | −2.8807611 | 1.52E−08 |
| 105 - 32 | N105 | C32 | MBD2_HUMAN - | −2.8901637 | 8.13E−09 |
| | | | Gilbert_Lab_CRISPRi_KRAB | | |
| 212 - 32 | N212 | C32 | HDAC8_HUMAN - | −2.8987062 | 3.58E−06 |
| | | | Gilbert_Lab_CRISPRi_KRAB | | |
| 74 - 293 | N74 | C293 | KDM5D_HUMAN - KRAB- | −2.9246829 | 7.72E−07 |
| | | | MeCP2 | | |
| 105 - 327 | N105 | C327 | MBD2_HUMAN - hs_NIPP1 | −2.9322523 | 1.80E−11 |
| 268 - 191 | N268 | C191 | FOXA1-Cterm - | −2.9355377 | 9.94E−07 |
| | | | CDYL_HUMAN | | |
| 215 - 345 | N215 | C345 | HDAC4_HUMAN - | −3.0575968 | 2.50E−08 |
| | | | MSX2_HUMAN | | |
| 298 - 5 | N298 | C5 | MBD2b - KDM1A | −3.080805 | 2.14E−09 |
| 341 - 105 | N341 | C105 | NCOR2_HUMAN - | −3.1917665 | 1.07E−08 |
| | | | MBD2_HUMAN | | |
| 215 - 105 | N215 | C105 | HDAC4_HUMAN - | −3.4746905 | 4.25E−11 |
| | | | MBD2_HUMAN | | |

The application's sequence listing, which the Patent Office published only in electronic form, follows.

SEQUENCE LISTING (709 sequences)

SEQ ID NO: 1 - protein, 1368 aa, Streptococcus pyogenes
MDKKYSIGLAIGTNSVGWAVITDEYKVPSKKFKVLGNTDRHSIKKNLIGALLFDSGETAEATRLKRTARRRYTRRKNRICYLQEIFSNEMAKVDDSFFHRLEESFLVEEDKKHERHPIFGNIVDEVAYHEKYPTIYHLRKKLVDSTDKADLRLIYLALAHMIKFRGHFLIEGDLNPDNSDVDKLFIQLVQTYNQLFEENPINASGVDAKAILSARLSKSRRLENLIAQLPGEKKNGLFGNLIALSLGLTPNFKSNFDLAEDAKLQLSKDTYDDDLDNLLAQIGDQYADLFLAAKNLSDAILLSDILRVNTEITKAPLSASMIKRYDEHHQDLTLLKALVRQQLPEKYKEIFFDQSKNGYAGYIDGGASQEEFYKFIKPILEKMDGTEELLVKLNREDLLRKQRTFDNGSIPHQIHLGELHAILRRQEDFYPFLKDNREKIEKILTFRIPYYVGPLARGNSRFAWMTRKSEETITPWNFEEVVDKGASAQSFIERMTNFDKNLPNEKVLPKHSLLYEYFTVYNELTKVKYVTEGMRKPAFLSGEQKKAIVDLLFKTNRKVTVKQLKEDYFKKIECFDSVEISGVEDRFNASLGTYHDLLKIIKDKDFLDNEENEDILEDIVLTLTLFEDREMIEERLKTYAHLFDDKVMKQLKRRRYTGWGRLSRKLINGIRDKQSGKTILDFLKSDGFANRNFMQLIHDDSLTFKEDIQKAQVSGQGDSLHEHIANLAGSPAIKKGILQTVKVVDELVKVMGRHKPENIVIEMARENQTTQKGQKNSRERMKRIEEGIKELGSQILKEHPVENTQLQNEKLYLYYLQNGRDMYVDQELDINRLSDYDVDAIVPQSFLKDDSIDNKVLTRSDKNRGKSDNVPSEEVVKKMKNYWRQLLNAKLITQRKFDNLTKAERGGLSELDKAGFIKRQLVETRQITKHVAQILDSRMNTKYDENDKLIREVKVITLKSKLVSDFRKDFQFYKVREINNYHHAHDAYLNAVVGTALIKKYPKLESEFVYGDYKVYDVRKMIAKSEQEIGKATAKYFFYSNIMNFFKTEITLANGEIRKRPLIETNGETGEIVWDKGRDFATVRKVLSMPQVNIVKKTEVQTGGFSKESILPKRNSDKLIARKKDWDPKKYGGFDSPTVAYSVLVVAKVEKGKSKKLKSVKELLGITIMERSSFEKNPIDFLEAKGYKEVKKDLIIKLPKYSLFELENGRKRMLASAGELQKGNELALPSKYVNFLYLASHYEKLKGSPEDNEQKQLFVEQHKHYLDEIIEQISEFSKRVILADANLDKVLSAYNKHRDKPIREQAENIIHLFTLTNLGAPAAFKYFDTTIDRKRYTSTKEVLDATLIHQSITGLYETRIDLSQLGGD

SEQ ID NO: 2 - protein, 1307 aa, Acidaminococcus sp.
MTQFEGFTNLYQVSKTLRFELIPQGKTLKHIQEQGFIEEDKARNDHYKELKPIIDRIYKTYADQCLQLVQLDWENLSAAIDSYRKEKTEETRNALIEEQATYRNAIHDYFIGRTDNLTDAINKRHAEIYKGLFKAELFNGKVLKQLGTVTTTEHENALLRSFDKFTTYFSGFYENRKNVFSAEDISTAIPHRIVQDNFPKFKENCHIFTRLITAVPSLREHFENVKKAIGIFVSTSIEEVFSFPFYNQLLTQTQIDLYNQLLGGISREAGTEKIKGLNEVLNLAIQKNDETAHIIASLPHRFIPLFKQILSDRNTLSFILEEFKSDEEVIQSFCKYKTLLRNENVLETAEALFNELNSIDLTHIFISHKKLETISSALCDHWDTLRNALYERRISELTGKITKSAKEKVQRSLKHEDINLQEIISAAGKELSEAFKQKTSEILSHAHAALDQPLPTTLKKQEEKEILKSQLDSLLGLYHLLDWFAVDESNEVDPEFSARLTGIKLEMEPSLSFYNKARNYATKKPYSVEKFKLNFQMPTLASGWDVNKEKNNGAILFVKNGLYYLGIMPKQKGRYKALSFEPTEKTSEGFDKMYYDYFPDAAKMIPKCSTQLKAVTAHFQTHTTPILLSNNFIEPLEITKEIYDLNNPEKEPKKFQTAYAKKTGDQKGYREALCKWIDFTRDFLSKYTKTTSIDLSSLRPSSQYKDLGEYYAELNPLLYHISFQRIAEKEIMDAVETGKLYLFQIYNKDFAKGHHGKPNLHTLYWTGLFSPENLAKTSIKLNGQAELFYRPKSRMKRMAHRLGEKMLNKKLKDQKTPIPDTLYQELYDYVNHRLSHDLSDEARALLPNVITKEVSHEIIKDRRFTSDKFFFHVPITLNYQAANSPSKFNQRVNAYLKEHPETPIIGIDRGERNLIYITVIDSTGKILEQRSLNTIQQFDYQKKLDNREKERVAARQAWSVVGTIKDLKQGYLSQVIHEIVDLMIHYQAVVVLANLNFGFKSKRTGIAEKAVYQQFEKMLIDKLNCLVLKDYPAEKVGGVLNPYQLTDQFTSFAKMGTQSGFLFYVPAPYTSKIDPLTGFVDPFVWKTIKNHESRKHFLEGFDFLHYDVKTGDFILHFKMNRNLSFQRGLPGFMPAWDIVFEKNETQFDAKGTPFIAGKRIVPVIENHRFTGRYRDLYPANELIALLEEKGIVFRDGSNILPKLLENDDSHAIDTMVALIRSVLQMRNSNAATGEDYINSPVRDLNGVCFDSRFQNPEWPMDADANGAYHIALKGQLLLNHLKESKDLKLQNGISNQDWLAYIQELRN

SEQ ID NO: 3 - protein, 1228 aa, unidentified
  source 1..1228: note = Bacterium of the family Lachnospiraceae
MSKLEKFTNCYSLSKTLRFKAIPVGKTQENIDNKRLLVEDEKRAEDYKGVKKLLDRYYLSFINDVLHSIKLKNLNNYISLFRKKTRTEKENKELENLEINLRKEIAKAFKGNEGYKSLFKKDIIETILPEFLDDKDEIALVNSFNGFTTAFTGFFDNRENMFSEEAKSTSIAFRCINENLTRYISNMDIFEKVDAIFDKHEVQEIKEKILNSDYDVEDFFEGEFFNFVLTQEGIDVYNAIIGGFVTESGEKIKGLNEYINLYNQKTKQKLPKFKPLYKQVLSDRESLSFYGEGYTSDEEVLEVFRNTLNKNSEIFSSIKKLEKLFKNFDEYSSAGIFVKNGPAISTISKDIFGEWNVIRDKWNAEYDDIHLKKKAVVTEKYEDDRRKSFKKIGSFSLEQLQEYADADLSVVEKLKEIIIQKVDEIYKVYGSSEKLFDADFVLEKSLKKNDAVVAIMKDLLDSVKSFENYIKAFFGEGKETNRDESFYGDFVLAYDILLKVDHIYDAIRNYVTQKPYSKDKFKLYFQNPQFMGGWDKDKETDYRATILRYGSKYYLAIMDKKYAKCLQKIDKDDVNGNYEKINYKLLPGPNKMLPKVFFSKKWMAYYNPSEDIQKIYKNGTFKKGDMFNLNDCHKLIDFFKDSISRYPKWSNAYDFNFSETEKYKDIAGFYREVEEQGYKVSFESASKKEVDKLVEEGKLYMFQIYNKDFSDKSHGTPNLHTMYFKLLFDENNHGQIRLSGGAELFMRRASLKKEELVVHPANSPIANKNPDNPKKTTTLSYDVYKDKRFSEDQYELHIPIAINKCPKNIFKINTEVRVLLKHDDNPYVIGIARGERNLLYIVVVDGKGNIVEQYSLNEIINNFNGIRIKTDYHSLLDKKEKERFEARQNWTSIENIKELKAGYISQVVHKICELVEKYDAVIALADLNSGFKNSRVKVEKQVYQKFEKMLIDKLNYMVDKKSNPCATGGALKGYQITNKFESFKSMSTQNGFIFYIPAWLTSKIDPSTGFVNLLKTKYTSIADSKKFISSFDRIMYVPEEDLFEFALDYKNFSRTDADYIKKWKLYSYGNRIRIFRNPKKNNVFDWEEVCLTSAYKELFNKYGINYQQGDIRALLCEQSDKAFYSSFMALMSLMLQMRNSITGRTDVDFLISPVKNSDGIFYDSRNYEAQENAILPKNADANGAYNIARKVLWAIGQFKKAEDEKLDKVKIAISNKEWLEYAQTSVKH

SEQ ID NO: 4 - protein, 1314 aa, Francisella sp.
  source 1..1314: note = subspecies novicida
MYPYDVPDYASGSGMSIYQEFVNKYSLSKTLRFELIPQGKTLENIKARGLILDDEKRAKDYKKAKQIIDKYHQFFIEEILSSVCISEDLLQNYSDVYFKLKKSDDDNLQKDFKSAKDTIKKQISEYIKDSEKFKNLFNQNLIDAKKGQESDLILWLKQSKDNGIELFKANSDITDIDEALEIIKSFKGWTTYFKGFHENRKNVYSSNDIPTSIIYRIVDDNLPKFLENKAKYESLKDKAPEAINYEQIKKDLAEELTFDIDYKTSEVNQRVFSLDEVFEIANFNNYLNQSGITKFNTIIGGKFVNGENTKRKGINEYINLYSQQINDKTLKKYKMSVLFKQILSDTESKSFVIDKLEDDSDVVTTMQSFYEQIAAFKTVEEKSIKETLSLLFDDLKAQKLDLSKIYFKNDKSLTDLSQQVFDDYSVIGTAVLEYITQQIAPKNLDNPSKKEQELIAKKTEKAKYLSLETIKLALEEFNKHRDIDKQCRFEEILANFAAIPMIFDEIAQNKDNLAQISIKYQNQGKKDLLQASAEDDVKAIKDLLDQTNNLLHKLKIFHISQSEDKANILDKDEHFYLVFEECYFELANIVPLYNKIRNYITQKPYSDEKFKLNFENSTLANGWDKNKEPDNTAILFIKDDKYYLGVMNKKNNKIFDDKAIKENKGEGYKKIVYKLLPGANKMLPKVFFSAKSIKFYNPSEDILRIRNHSTHTKNGSPQKGYEKFEFNIEDCRKFIDFYKQSISKHPEWKDFGFRFSDTQRYNSIDEFYREVENQGYKLTFENISESYIDSVVNQGKLYLFQIYNKDFSAYSKGRPNLHTLYWKALFDERNLQDVVYKLNGEAELFYRKQSIPKKITHPAKEAIANKNKDNPKKESVFEYDLIKDKRFTEDKFFFHCPITINFKSSGANKFNDEINLLLKEKANDVHILSIARGERHLAYYTLVDGKGNIIKQDTFNIIGNDRMKTNYHDKLAAIEKDRDSARKDWKKINNIKEMKEGYLSQVVHEIAKLVIEYNAIVVFEDLNFGFKRGRFKVEKQVYQKLEKMLIEKLNYLVFKDNEFDKTGGVLRAYQLTAPFETFKKMGKQTGIIYYVPAGFTSKICPVTGFVNQLYPKYESVSKSQEFFSKFDKICYNLDKGYFEFSFDYKNFGDKAAKGKWTIASFGSRLINFRNSDKNHNWDTREVYPTKELEKLLKDYSIEYGHGECIKAAICGESDKKFFAKLTSVLNTILQMRNSKTGTELDYLISPVADVNGNFFDSRQAPKNMPQDADANGAYHIGLKGLMLLGRIKNNQEGKKLNLVIKNEEYFEFVQNRNN

SEQ ID NO: 5 - protein, 5 aa, synthetic construct
GGGGS

SEQ ID NO: 6 - protein, 9 aa, synthetic construct
GGGGGGGGG

SEQ ID NO: 7 - protein, 9 aa, synthetic construct
EEEEEEEEE

SEQ ID NO: 8 - protein, 9 aa, synthetic construct
SSSSSSSSS

SEQ ID NO: 9 - protein, 9 aa, synthetic construct
GGGGGCPPC

SEQ ID NO: 10 - protein, 15 aa, synthetic construct
GGGGSGGGGSGGGGS

SEQ ID NO: 11 - protein, 13 aa, synthetic construct
SCVPLMRCGGCCN

SEQ ID NO: 12 - protein, 14 aa, synthetic construct
PSCVPLMRCGGCCN

SEQ ID NO: 13 - protein, 9 aa, synthetic construct
GDLIWRNQL

SEQ ID NO: 14 - protein, 23 aa, synthetic construct
GGGGGGGGGPSCVPLMRCGGCCN

SEQ ID NO: 15 - protein, 4 aa, synthetic construct
GTGA

SEQ ID NO: 16 - DNA, 258 bp, synthetic construct
  source 1..258: mol_type = other DNA
gccaccatggatcaagaaggaggcggagatgggcagaaggccccatcttttcaatggcgcaattataaactgatcgttgacccagcactcgatcccgctctccggcgcccttcacagaaggtttaccgatatgatggcgtgcatttctcagttaacgactctaagtacattccagtggaagacctccaggaccctcgatgccacgtgcggtcaaaaaatcgggatttctccttgccagtcccaaaatttaagttggac

SEQ ID NO: 17 - DNA, 1236 bp, synthetic construct
  source 1..1236: mol_type = other DNA
gccaccatggagcataactacgccctggcagtcaagcccaccccgccagctcccgcgttgagacctccggagccggtcccagcacctgccgcgttgttctcctcccctgcagacgaggtgctggaggcccctgaagtggtggtggcagaggcagaggaaccaaagccccagcagctgcagcaacagcgggaagaaggggaagaggaaggagaagaggaaggtgaggaagaggaggaagaatctagcgattcctcctcaagcagcgatggagagggtgccttgcggagaaggtctttgagatcccacgccaggaggagaagacctccgccaccaccgccccctccccctccccgcgcctacgaaccacgctcagaattcgaacagatgactatcctgtatgatatttggaattccggattggacagtgaagacatgtcctatctcagactgacttacgaacgattgctccaacagacatccggcgccgactggcttaatgacacccactgggttcaccacacaatcaccaacctgaccacccctaagcgaaaaaggaggcctcaggatggacctcgggagcaccaaacggggagtgcgaggtccgaagggtattatcctatctccaaaaaggaaaaggataagtatctggatgtttgccccgtttccgcccggcaactggaaggcgtggacactcaagggaccaatagggtgctcagcgaaagacgatctgaacagaggaggcttctctccgctattggtacgtctgcaatcatggatagcgatttgctgaaactcaatcaactgaagttccgaaagaaaaagctgagattcggaaggagccggatccacgaatggggtctgttcgccatggaacccatcgctgcagacgagatggtaattgagtacgtgggccagaatattcggcagatggtcgctgacatgagggagaaacggtacgttcaagaaggtattggatcttcctacctctttagagttgaccacgacacaatcatagatgcgaccaaatgtggtaacttggctaggttcatcaatcattgctgcacaccaaattgttacgcaaaggtcatcacaatcgaaagtcaaaaaaagattgtgatatactctaagcagcccatcggcgtggatgaggagatcacttacgactataagttccccctcgaggacaataagattccatgcctgtgcggcactgaaagctgcagggggtctctcaac

SEQ ID NO: 18 - DNA, 1290 bp, synthetic construct
  source 1..1290: mol_type = other DNA
gccaccatggccaagacagttgcctatttctatgacccagacgtgggaaattttcattacggcgcggggcatcctatgaagccccacagactcgcactgactcacagcttggttctccactacgggctgtacaagaagatgattgtcttcaagccatatcaggcatcccagcacgatatgtgccgatttcacagcgaggattacatcgattttctgcaacgggttagtcccacaaatatgcagggttttaccaaaagcctcaatgcctttaatgtcggggatgactgtcctgtctttcctgggctcttcgagttttgctccagatacaccggggctagcctccagggcgccacccagcttaataacaaaatttgcgacattgcaatcaactgggccgggggtcttcaccacgccaaaaagttcgaggcgtccgggttttgttacgtcaacgacattgttatcgggattcttgagctgcttaaataccatccacgggtgttgtatatcgatatcgatattcatcatggcgacggtgtccaggaagcattctacctgactgacagagtaatgaccgtttccttccataagtatggcaattactttttcccagggacgggagacatgtacgaagtcggcgccgagagcggccgatattactgcttgaatgttccactcagggacgggatcgatgaccaatcctacaaacatttgtttcaacccgttatcaatcaggtcgtggacttctatcagccaacctgcatcgtgctccagtgtggtgccgactctctcggctgtgacagactcgggtgttttaatctgtccattagaggacacggcgaatgtgtcgagtacgttaaatccttcaatattcctctcctggttctgggaggcggcgggtacacagtgagaaacgtcgctcgatgctggacctacgagacgtcactcctggtggaggaggctatctcagaggaactgccttacagcgagtattttgagtacttcgccccggactttacgctgcacccagatgtctcaactcggatcgagaaccagaactctcgccagtacctcgatcagattcggcaaaccatcttcgagaacctgaagatgctgaaccacgcccccagcgttcagatacacgacgtgcccgcagatttgctgacatacgaccggacagacgaggccgatgcggaggagaggggacctgaggaaaattactccaggccagaagccccaaacgagttctatgacggggaccacgataatgataaagaatctgatgtggagatt

SEQ ID NO: 19 - DNA, 3291 bp, synthetic construct
  source 1..3291: mol_type = other DNA
gccaccatgaaatcatgcggcgtgtccctggcaactgcagccgcggcagctgcggcctttggggacgaagaaaaaaagatggcagccgggaaggcatccggcgagtccgaagaggcctccccttctctgaccgcagaggaaagagaggccctgggcggcctcgatagcagactgtttggcttcgtgaggtttcatgaggatggcgcacgcacaaaggctctgctcgggaaggcggtcaggtgctacgagtctctgattttgaaggccgagggaaaggtggagtctgacttcttctgccagttggggcattttaatctgcttttggaggattacccaaaggctctctctgcataccagcgatactattcccttcaaagcgattattggaaaaacgcagcttttctctacggcctgggcctggtctattttcattacaacgcctttcagtgggctatcaaagctttccaagaagtgctgtacgtggacccgtctttctgtcgagctaaggaaattcatctgcgactgggactgatgttcaaagtgaacacggattacgagtcatcccttaagcactttcaactggcccttgtggattgcaacccctgcactttgtctaacgctgagattcagttccatattgcccacttgtacgagacacagcgcaaatatcacagcgccaaagaggcatatgaacagctgctgcagactgagaatctctcagcccaggtgaaggctactgtattgcagcagctgggttggatgcaccatacagttgacttgctgggtgacaaagctacgaaggaaagctatgcgatccagtatcttcaaaagtccctggaagccgatcccaattctgggcagagctggtatttcctcgggcgctgttactccagcattggcaaggttcaggacgctttcatatcctacaggcagtcaatcgacaaaagtgaagcctccgccgacacctggtgttctatcggcgtactgtaccagcaacagaaccagcctatggacgcactgcaagcctatatttgtgctgtgcagctggaccacggccacgccgctgcatggatggacctggggaccctgtatgaaagctgcaaccagccacaggatgccatcaaatgttaccttaatgccacgaggagcaagtcttgttctaatacgtcagccctggctgcccgcattaagtacctccaggctcagttgtgcaacctgccacagggttccttgcaaaataaaacaaaactcctgccatcaattgaagaagcatggtccttgcccatccccgccgagctgacttctcggcagggtgctatgaatactgcccagcagaatacgtctgacaactggagcggtggacacgccgtgagccatcctcccgtgcagcagcaggcacacagttggtgcctgaccccacagaaattgcaacaccttgaacagctcagggcaaacagaaataatctcaacccggcccagaagcttatgctcgagcagcttgagagtcaatttgtactcatgcagcagcatcagatgaggcctaccggagtggctcaggtgagaagcacaggcataccaaatggccctaccgcagattcaagcctgccaactaattcagtgagtggccagcagccccagttggccctgacgagagtgcctagtgtgtcccagccgggagtacggcctgcttgtcctggccaacccctggcaaacggcccattctctgcggggcacgtgccttgttctacttctaggacccttggttccactgatactatcctcatcggaaacaatcatatcactggctccggatctaacgggaatgtcccatacctgcagcggaatgcgcttaccttgccacataatcgaaccaatctcacctccagtgctgaagagccctggaagaatcagctgtctaatagtacccaggggctccacaaggggcagtcttctcatagcgccggccctaatggcgagagacccctgagtagtaccggcccttctcaacatctccaggcagctgggtccgggatccagaatcagaacggccaccccactctcccaagcaactctgtcacccagggtgcagcacttaaccacctgtcctcacacacggccacctcaggtggtcaacaaggtatcaccctgaccaaggaatccaaaccgtcagggaacatcctcacagtccctgagacctctaggcatactggggaaacccccaatagtacagcctctgtggaagggctgcccaaccacgtgcaccaaatgaccgccgatgctgtgtgctctccaagccacggggattcaaagtcccctggtctgctgtcctccgacaatccacagctgtcagcattgcttatgggaaaagctaacaataatgtgggcaccggtacttgcgacaaggtaaacaatatccatcccgcagtgcataccaaaaccgacaactctgtggccagtagcccttccagcgctatctccacagctactccctcacccaaatccacagagcagaccaccacgaattctgtaacttccctgaatagtccccattcaggacttcacacgatcaatggcgagggaatggaggagtctcaatccccaatgaaaacagacctgcttctcgtcaaccacaagcctagtccacaaataattccctcaatgtccgtcagcatatatccctcctccgcagaggtgctgaaggcttgcagaaacctgggtaagaatggactgtcaaactcttctatcctcctcgacaagtgtcccccacccagaccaccttcaagcccgtaccctcccctcccaaaggataagctcaacccaccaacaccctccatctacctcgaaaacaagagagatgcattcttccctccactgcaccaattttgcactaaccccaataaccccgttactgtgatcagaggactcgctggggcattgaaactggaccttggtcttttttccaccaaaacccttgtggaggcaaacaacgaacatatggtcgaggtcaggactcagctcctccagcccgccgatgaaaattgggatcctaccggaaccaaaaagatttggcactgtgagtcaaatagatcccataccacaattgccaaatatgcacagtaccaggcctcaagctttcaggaatcactccgggaagaaaatgaaaagcgctctcatcataaggaccactcagatagcgaaagcacaagtagtgacaacagtggaagaaggcggaaggggccattcaagaccatcaaattcggtaccaatatagatctgtctgacgataagaag

SEQ ID NO: 20 - DNA, 519 bp, synthetic construct
  source 1..519: mol_type = other DNA
gccaccatgctctccggaaaaaaggccgctgcggctgccgctgccgctgcagccgctgccaccggaacagaagccgggccagggacagctggcggatctgagaatggctccgaggttgcagcacagcccgcaggcctctctggaccggccgaggtgggacctggagccgttggggagcggacaccaagaaaaaaagagccaccacgagcctccccccccggtgggctcgccgaaccaccgggctccgcgggcccccaggctgggcccaccgtggtccctggtagcgccactcctatggagacgggaatcgcggagacccccgagggacgacggactagtaggaggaaacgcgcaaaggtggaataccgggagatggatgaatctctcgctaacttgtccgaagatgagtattactctgaggaagaaaggaatgcaaaggctgaaaaagagaaaaagcttcccccaccacctccgcaggcaccgcctgaggaggaaaacgaaagcgagccagaggagccc

SEQ ID NO: 21 - DNA, 1728 bp, synthetic construct
  source 1..1728: mol_type = other DNA
gccaccatgaaagtgattataataggttccggcgtttccggtcttgcagctgcgcgacagctgcaaagctttggaatggatgtaaccctcctggaggccagagatagagtcgggggacgcgtggccaccttcagaaaggggaactatgtcgctgatcttggtgcaatggtagtaactggcctcggtggcaaccccatggctgtggtctccaaacaggtgaatatggagctggccaaaattaaacagaagtgccctctgtatgaagcgaacggccaagccgtgccaaaggaaaaagacgagatggtggagcaggaatttaacaggctgcttgaggcaacgtcctatttgtcccaccaactggattttaacgtgctgaacaataagcccgtgagccttggccaagcactggaggtggtaatccagctgcaggaaaagcacgtgaaggatgaacaaattgagcattggaagaaaatcgtgaagactcaggaagagttgaaagagttgctgaacaaaatggtaaacctgaaagagaagattaaagaactccaccagcagtacaaagaagccagtgaggtaaaaccgcctagggatattacagccgagtttctcgttaagtccaaacaccgagatctgacagctttgtgcaaggaatatgatgaactggccgagacccagggaaagctggaagaaaagcttcaggagctggaggcaaaccccccaagcgacgtgtacctgtcctccagggatagacaaatcctcgattggcacttcgccaacctggagttcgcaaacgccacgccactctccacactgtctcttaagcattgggatcaagatgacgactttgagtttaccggaagtcatcttaccgttcggaacggctattcctgcgtccccgtggcactggccgagggcctggacataaagctgaatacagccgtcagacaggtcagatatactgcaagcggatgtgaggtgattgccgttaacacgcgatccacgtctcagacatttatatacaaatgtgatgccgtcctgtgcactctgccactcggggtgctgaagcagcagccgccagcagtccaattcgtaccccccctgcctgaatggaagacctccgccgtgcagcgcatgggcttcggcaacctcaacaaggtggtgctgtgttttgaccgcgtattctgggacccatctgtcaatctgttcgggcacgtggggtcaactactgctagtcggggcgaactgtttctgttttggaacctgtacaaggccccaattttgctcgcccttgtggccggtgaagcagccggcatcatggagaacataagtgatgatgttattgtgggcagatgcctggcgatcctgaaaggtatctttggatctagtgccgtaccccaaccaaaagaaactgtggtgtcaaggtggcgcgccgacccatgggcccgcggaagctatagttatgtggccgcaggcagttccggcaatgactatgacctgatggcccagccgatcaccccgggtccctctatcccaggggcgcctcagcctattccgcgactgttctttgcaggcgagcacacaataagaaattaccctgctaccgttcacggggctctgctctccggcctgagggaggccggccgcatcgcagatcagttcctcggggcgatgtatacactgccacgccaggccactcctggtgtgcctgcacagcagagtccaagcatg

SEQ ID NO: 22 - DNA, 624 bp, synthetic construct
  source 1..624: mol_type = other DNA
gccaccatggatgctaagtccctgactgcctggagccgcactttggtgacattcaaggatgtttttgttgactttacccgagaggaatggaaattgctggatacagcacaacagatagtgtacagaaatgtgatgctcgaaaactacaagaaccttgtttcactgggatatcagctcactaaacccgatgtcattttgcgactggagaagggggaagagccttggctcgtggaaagagagatccaccaagagacacaccccgattccgaaactgcattcgagataaaaagctcagtcagttctcgcagcatcttcaaagataaacagagctgcgacataaaaatggaagggatggcgcgaaacgacctgtggtacctctccttggaggaggtgtggaagtgcagggatcagctggacaagtaccaggaaaaccctgaacgccatctgagacaggtcgcatttactcaaaaaaaggtactcacccaagagagagtttccgagagtggtaagtatgggggcaattgcctgttgcccgcccagttggtcctgcgggagtatttccacaagcgcgattcacacacaaagtctctgaaacacgaccttgtacttaatggtcatcaagac

SEQ ID NO: 23 - DNA, 225 bp, synthetic construct
  source 1..225: mol_type = other DNA
gccaccatggtggcgggcatgcttgggcttcgcgaagaaaagtccgaagatcaggatctgcaaggacttaaggacaaacctctgaaattcaagaaggtcaaaaaagacaagaaagaggagaaggaggggaaacatgaaccagtccagccttccgcccaccactcagcggaacctgctgaggctggaaaagctgagacctctgagggatctggctctgcgccagcc

SEQ ID NO: 24 - DNA, 906 bp, synthetic construct
  source 1..906: mol_type = other DNA
gccaccatgcgcggaagaccaaaagggagtggaaccacccggcccaaagccgccaccagcgagggcgtccaggtgaagcgcgtcctggaaaaaagcccgggtaagctgttggtcaaaatgcctttccaaacctcacccggaggtaaagcagaaggtggcggcgctacaacgtcaacacaggtcatggttattaagcgccccggacgcaagcgaaaagccgaggccgatccacaggctattccgaagaagcggggcagaaagccgggttcagtcgtcgccgccgccgccgcagaggccaaaaagaaagcagttaaagaatcttcaatccgcagcgtccaggagacagtgctcccgattaaaaaacgaaagaccagggagaccgtgagtatagaggtgaaggaggttgtgaagcccctgctcgtgtcaacactgggagagaaatccgggaaagggctgaagacatgtaagagccctgggcgcaagagcaaagaatcatccccaaagggtcggtcctctagcgcttcaagccctcctaaaaaggagcatcaccaccaccatcaccactccgaatctccaaaagctcccgtgcccttgctgccccctttgcccccacctccgccggaacccgagtccagtgaagatcctactagccctcctgagcctcaggatctgagttcaagtgtttgcaaggaagaaaaaatgccgaggggaggtagtctcgagagtgacggttgcccgaaggagcctgcaaagactcaacctgccgtggccaccgccgccaccgctgctgaaaagtataagcacaggggagagggtgagagaaaggatatagtgagtagctctatgcctagacccaaccgcgaggagcccgttgatagcagaactccagtgaccgaaagagtatct

SEQ ID NO: 25 - DNA, 1236 bp, synthetic construct
  source 1..1236: mol_type = other DNA
gccaccatgtcagtcagcaccctcaaatccgaagatatcaagattagacaggacagcgtgacgaaactgctcacagatgtccaacttatgaaagggaagcaagagtgtatggacagcaaactcctcgctatgaaacacgagaacgaagcactgtggcgggaggttgcatcacttcgccagaagcatgcacagcagcagaaagtggtgaataaactcattcagttcctgatctcactcgttcagagtaatcggattcttggcgtcaagcggaaaattcctctcatgctcaacgattcaggctctgcccacagtatgccaaagtattcacgccaattttccctggagcacgtgcacggtagcgggccttatagcgctcccagccctgcgtactctagctcctctctgtatgcaccagatgctgtagcatcctcagggcctatcatttctgacatcacagagttggctcctgcctcccctatggcaagtcccggtggctctatagacgaacgacctctctcatcctcccccttggtaagggtgaaggaggagccgcccagcccgccacaatccccgcgcgtagaagaagcatctccgggaagacctagttccgtcgacacccttctgagtccaaccgcgttgattgattccatactgcgcgagtctgagcctgcgcctgccagcgttacagcgctgactgacgctcgaggccacaccgatactgaggggcggcctccatcccctcctcccacatcaacccccgaaaaatgtcttagcgttgcgtgcttggacaagaacgaattgtctgaccacctggatgctatggactctaaccttgataacctccagactatgctcagttcacacgggtttagcgtcgatacctcagccctcttggacctgttctccccctccgtaacagtgcctgatatgtctcttccagacctcgactctagcttggccagtatccaggaactgctgtcaccccaagagcccccaaggccacctgaggcagagaactcttctcccgactctggaaaacagctggtccactatacggcacaacctctgtttttgttggacccaggctctgtcgatactgggagcaatgacctccctgttctgttcgagctgggggagggatcatacttttccgaaggcgatggctttgcggaggaccccactatcagcctgctcactgggagcgaaccccctaaagccaaagaccccacggtgtca

SEQ ID NO: 26 - DNA, 3447 bp, synthetic construct
  source 1..3447: mol_type = other DNA
gccaccatggcccatagttgcagatggcggttccctgcaaggcctgggacaactggtgggggaggaggcggaggaagacgaggcttgggtggggcccccaggcagcgcgtgccagccctgctcctcccaccaggacctcctgtagggggcggcggaccaggtgcacctccatctccacccgcagtggctgccgctgctgcagctgcggggtcttctggcgcaggggtgcccggtggagcggccgccgctagcgcagccagctcatccagtgcatccagctctagcagttcatcctcttctgccagctccggcccggccctgctcagagtgggtcccgggtttgacgccgctctgcaggtttccgcagccattggaacaaatctcagacggtttcgcgcagtgttcggcgaatcagggggaggaggaggctctggcgaagacgagcagttcctcggttttggctccgacgaggaggttagggtcagaagccctactcgatccccctccgtgaagaccagtccccgcaaaccccgcggccgaccgcggtccggtagcgatcggaattccgccatccttagtgatcccagcgtgttttccccactgaataaatccgaaacaaagagtggagacaaaataaagaaaaaagacagtaagtccatcgagaagaaacgcgggcggccccccaccttccctggcgtgaaaattaagataacacacggaaaagacataagcgagcttccgaaaggtaacaaggaggatagtctgaagaagataaaaaggacaccgtccgccactttccagcaggcaaccaagattaagaagcttagagcaggcaaactctccccgctcaagtcaaagttcaaaacggggaaactgcagatcgggcggaaaggagtccagattgtccgacggaggggacggcccccttctacagaacgcatcaagactccgagtggtctcctgatcaattcagagttggagaaacctcaaaaggtgcggaaagacaaggaaggtaccccccccttgacgaaggaggacaagacagtcgttcggcagtcaccacggcgcatcaaaccagtgaggatcatccctagttccaaacgaaccgatgctacaatcgctaagcaattgctgcagcgggccaaaaagggcgcacagaaaaagatcgaaaaggaggccgcgcaactccaaggcagaaaagtgaagacgcaggtgaaaaacatcaggcagttcatcatgccagtcgtgagcgccatttcttctagaatcattaagaccccccggcggttcatcgaggatgaggattatgatcctccaattaagatcgctagattggagtctacccctaatagccggttctccgcacctagttgcgggtcctccgaaaaatcctctgccgctagtcagcatagtagtcaaatgtccagtgactcttcacgcagttcatctccctctgtagatacgagcacagacagccaggctagtgaggaaatccaagtgctccccgaggagaggtccgacacacccgaggttcacccacctctgcctattagccagtcacccgagaatgaatctaacgatagacggagcagacggtacagtgtttccgagcggagctttgggtctagaactacaaaaaaactgtccactcttcagagtgctccgcagcagcagacttctagttctccaccgccaccactgcttacgcccccgccaccactgcagcccgcctcatccatttctgaccacactccctggctgatgccccccactatccctctcgcatcacccttccttccagcctccacagctccaatgcaagggaaacgcaagagtatcctgcgcgagccaacctttcgatggaccagccttaagcactcccgctctgagcctcagtacttcagctccgccaagtacgccaaagagggcctgattcgcaaacccattttcgacaatttccggcccccacctctgacccccgaggatgtaggttttgcctcaggcttctcagcgtccgggaccgccgccagcgctcgccttttcagccctctgcatagcggtacaagattcgatatgcacaagagaagccctttgcttcgcgcaccgagattcactccctctgaggcgcactcaagaattttcgagtctgtaacattgccatccaataggacctccgctggcacctcttcttccggcgttagcaatcgcaaacgaaagagaaaagtcttctcacccataaggtccgaaccaaggtctccttcccacagtatgcgaaccagaagcggccggctttcatcttccgagttgagcccacttacccccccatcctccgtgagtagtagtctgagcatttctgtttcccccctggcaaccagtgcactcaaccccactttcacatttccatctcacagccttacgcaaagcggagagagcgcagagaagaaccagcgacccaggaaacaaacttccgcccccgccgaacccttctcatcctctagccccacacctctcttcccttggtttactcccggatcccagaccgagagaggaagaaacaaagacaaagctccagaggagctgtcaaaggatagggacgcagacaagtcagtggagaaggataaaagccgcgaaagagacagagagagggaaaaggaaaacaagagggaatcccggaaagagaagaggaaaaagggcagtgaaattcaatcatcctccgcactgtacccagttggcagagttagtaaggaaaaggtggtgggagaggatgtggctacttcatccagtgccaagaaggctacagggcgaaagaaaagctcctcacacgatagtgggactgatataactagcgtgacactgggggatacgaccgcagtgaagacaaaaattcttattaagaagggccgaggaaatctcgaaaagacaaacctcgatcttggccctacagcaccatctttggagaaagagaagactctttgtcttagcaccccaagcagcagtactgtgaaacactctacaagtagtatcggctcaatgctggctcaggctgataagctgcccatgacagacaagagagtagctagccttctcaaaaaagccaaggcgcagctgtgcaaaatagagaagagtaaatcacttaaacagactgatcagccgaaggcacagggccaggaatccgactcatctgagacttctgtgcgaggacctcgcattaaacatgtttgcaggcgcgctgcagtggctttgggacggaagagggctgtatttcctgatgatatgcctaccctgtccgccttgccatgggaggaaagagaaaaaatactgagcagcatgggcaatgacgataagtcttcaatcgctggatcagaagacgccgaaccccttgctccgccgataaagccgatcaagcctgtgactcgcaacaaagctccccaggagcctccagttaag

SEQ ID NO: 27 - DNA, 714 bp, synthetic construct
  source 1..714: mol_type = other DNA
gccaccatgcagaatctccagtggatgccgtctaaagcctatctccagaagcaggccaaagctgtgaaaaagaaggaaaaaaaaagcaaaacttctgagaagaaggattctaaggagtccagcgttgtgaagaatgttgtggattcttctcaaaagcccacccccagtgcgagggaggatccagcgcccaaaaagagctcttctgagccccctccaagaaagccagtagaggagaaaagcgaagaaggcaatgtgtctgctcccggccctgagagcaaacaggcgaccaccccggccagcagaaaatctagtaagcaggtcagtcagcctgcactggtgatcccacctcagccccccaccaccggccctcccaggaaagaggtcccaaagaccactcctagtgaaccgaagaaaaaacagcctcccccaccagagtctggccctgagcagtctaaacagaagaaggtcgcacccagaccaagcatcccggtgaaacagaagcctaaggaaaaggaaaagccaccacctgtgaacaagcaggagaacgcgggcacgctgaatattctgagcactctgtccaatggaaactcttcaaagcagaaaatccctgccgatggagtacatcggatccgcgtggattttaaggaggattgcgaagctgagaatgtctgggaaatggggggactgggaattctcacctctgtacccattact

SEQ ID NO: 28 - DNA, 795 bp, synthetic construct
  source 1..795: mol_type = other DNA
gccaccatgcccgataccgacgacagacaccggatcgaggagaagagaaagcgcacatatgagaccttcaagagtattatgaagaaatctcctttctcaggtccaaccgatcctcgccctcccccaaggcgcatcgccgtgccaagccggtcttcagcttccgttccgaaacccgcccctcaaccttacccattcacctcctcactttctaccatcaactacgatgaattccctaccatggtgttccccagcggtcagatatctcaggcttctgccttggctccagcccctccccaggtgctcccgcaggcacctgcccctgcccccgcgcccgcaatggtgagtgcactggcccaggccccggctcctgtgccagttttggcccctgggccaccccaagctgtggcacccccagcccctaagccaacacaagccggcgagggtactctttctgaagcgcttctccagctgcagtttgacgatgaagatctgggtgctctgctggggaactccacagacccagccgtgttcactgacttggcctccgtggacaacagcgagttccagcagctgctgaatcagggaatccccgtcgcgccgcacactacagaacccatgcttatggaatacccggaggcaataacccggttggttacgggcgcccagcggccaccagaccccgcccccgcacccttgggggccccgggccttcctaatggcctcctctctggtgatgaagatttctcctccattgctgatatggactttagtgcactcctgagtcagatcagttct

SEQ ID NO: 29 - DNA, 975 bp, synthetic construct
  source 1..975: mol_type = other DNA
gccaccatggccgagaatgtggtcgagcccggccccccctctgctaagcgccctaaactgtcaagtcctgccctgagcgcttcagctagcgatggaaccgacttcggatccctgttcgacttggaacatgatctgcctgacgagctgatcaactccactgaactcgggctgacgaacggtggcgacatcaatcaactgcagacatccctcggcatggttcaggatgcggcaagcaagcacaagcaactcagtgaactgcttcgctcagggagttccccgaatttgaacatgggggtggggggtccaggccaggtgatggcatctcaggcccagcagtcctcaccaggactgggcttgataaacagcatggtaaagtcccctatgactcaggccggattgacaagccccaacatgggcatggggactagcggtccgaaccaaggacctacccagtccactggcatgatgaatagtcctgttaatcagcctgcaatgggcatgaacaccggcatgaacgccggtatgaacccaggcatgctcgcagccgggaacggtcaaggaatcatgccaaaccaagtcatgaacggatctataggagccggaagggggcggcagaatatgcagtaccccaaccctggaatggggagcgccggcaatttgcttacggagcccctgcagcagggatcaccccagatgggaggccaaaccggcctgcgcggcccacagccacttaaaatgggtatgatgaataaccctaatccttatggaagcccatatacgcagaaccccggacagcagattggcgctagcggtctggggctccaaatccagaccaaaacagttctcagcaataatctcagccctttcgctatggacaagaaggcagtgcccggcgggggcatgcccaacatgggccaacagcccgcaccccaggtccagcagcctggcctggtgacacctgtcgctcaggggatg

SEQ ID NO: 30 - DNA, 1815 bp, synthetic construct
  source 1..1815: mol_type = other DNA
gccaccatgctcaggcagcaacagctccagcatcggctgcaacaagcccaaatgttgcgacgccggatggcctccatgcagaggacaggtgtggtcggacagcagcagggcctcccgtccccgactcccgccaccccaacaaccccaaccggccagcagcctactacaccccagaccccccaacctaccagccagccacagcctacaccccccaacagcatgcccccatatttgcctagaacacaggctgctgggccagtgagccagggaaaagccgccggtcaggtcaccccacctactccaccacagaccgcccaaccaccacttcccggccctcctccagcagcagttgaaatggcaatgcagatccagcgagcagccgagactcagcggcaaatggcccacgttcaaatctttcagaggccgatccagcaccagatgccaccgatgaccccgatggctcccatggggatgaaccctccacctatgacaaggggacctagcgggcacctcgaacctggaatgggcccaacgggcatgcagcaacagcctccctggtcccagggggggctcccacagccacagcagttgcagagcggcatgccccgacccgccatgatgtctgtggctcagcacggacaacctctgaatatggcccctcagcctggtctcgggcaggtggggatttctcccctgaagcctggcaccgtctctcagcaggctttgcagaacctgctgagaactttgcggagcccaagttctccgcttcagcagcagcaggtgctcagtatcttgcatgctaatccacaactgctcgcagcttttatcaaacagcgagcagctaagtacgctaacagcaatccacagccgattccagggcaacctggtatgccgcagggacagccgggtttgcagcccccaaccatgccgggtcagcagggcgtccatagcaaccccgccatgcagaatatgaatccaatgcaggcaggagtccagagagcaggtctgccccaacagcagccacagcagcagctgcagccccctatgggagggatgtccccccaggcccaacagatgaatatgaaccacaacaccatgccaagccaatttcgggacatactccgacggcagcaaatgatgcagcagcagcagcagcagggagccggccctggcattgggcccggtatggcgaaccacaaccagttccagcagccccagggcgttggataccctccacagcagcagcagagaatgcagcaccacatgcagcagatgcagcagggcaatatgggccaaattggccagttgcctcaagcactgggggctgaggccggagcctcccttcaggcttaccaacagagactgcttcaacagcagatggggtcccctgttcagccaaacccaatgtcccctcagcaacacatgctgccaaaccaggcgcaaagtccccatcttcaagggcagcaaattcccaacagcctcagtaatcaggtgcgaagtcctcaacccgtgccttcccccaggccgcagagccagcctccacattcaagcccgtcacctcgcatgcagcctcagccttccccccaccacgtgagtccacagacgagttccccccatcccgggcttgtcgcggcacaagcgaaccctatggaacagggccattttgcaagtccagaccagaacagcatgttgagccagttggcttcaaaccccggcatggccaaccttcatggcgccagtgccacagatctcggactgtccaccgataactctgacctgaattcaaacctctcacagagcactctggacatccac

SEQ ID NO: 31 - DNA, 483 bp, synthetic construct
  source 1..483: mol_type = other DNA
gccaccatgggtcagacagggaagaagtccgaaaagggtccagtgtgttggcgcaaacgggttaaaagtgagtacatgcgccttcgccagctgaagcgcttcagacgggccgatgaagtcaagtccatgttttctagcaaccggcagaaaatccttgaaagaaccgagatcttgaaccaggagtggaagcagcgcagaatccaaccagtccacatcctcacaagcgttagttctcttagaggcaccagagaatgcagcgtcacgtctgatctggattttccaacccaggtaattccgctgaaaaccctgaatgctgttgcttctgtgcccattatgtattcatggtcacctctccagcagaacttcatggtcgaggatgaaacggtgctccataacatcccttatatgggcgacgaagttctggaccaagacgggacctttatcgaagagttgattaaaaattatgatggtaaagttcatggt

SEQ ID NO: 32 - DNA, 840 bp, synthetic construct
  source 1..840: mol_type = other DNA
gccaccatgagagtgaaagagtcctccattattgctccagctcccgctgaggacgtggacacaccaccccggaaaaaaaagagaaaacaccgcctgtgggccgctcactgtagaaagatccagcttaagaaggacgggagttcaaatcatgtgtacaactaccaaccctgcgaccatccgagacagccttgcgattcctcttgtccctgcgttatagcgcagaatttctgtgaaaagttctgtcaatgcagctctgaatgccagaaccgctttcccggctgccggtgtaaagcacagtgtaatacaaagcagtgtccttgctaccttgcggtgcgcgagtgcgacccggatttgtgcttgacctgcggtgctgctgatcattgggactcaaagaacgtttcttgcaaaaactgtagtatccagagaggctctaaaaagcacctgcttctggctccttcagacgtcgctggatggggcatcttcatcaaagacccagtccagaagaacgagtttatatctgagtactgtggagaaatcatctctcaggatgaggccgataggagaggcaaggtctatgataaatatatgtgtagctttctgtttaatctgaataacgactttgtggttgacgcgacccgaaaaggaaataaaatccggtttgccaatcactccgttaaccctaactgttacgccaaagtcatgatggtcaacggcgatcaccgaatcgggatatttgcgaagcgagctatccagactggagaggaactgtttttcgattacagatattcacaagctgatgcactgaagtacgtcggcattgagcgggagatggagattcct

SEQ ID NO: 33 - DNA, 822 bp, synthetic construct
  source 1..822: mol_type = other DNA
gccaccatggcgaccccaaggggtaggaccaaaaaaaaggctagctttgatcatagccctgattccctgcctttgcgcagtagcggtcggcaagctaagaagaaagccactgaaaccaccgacgaggatgaagatggggggagtgaaaagaaatatcgcaaatgcgagaaagcaggctgcacagccacttgcccagtgtgctttgcctccgcatcagaaagatgcgccaagaacgggtacacctcccgctggtatcaccttagctgtggggagcatttctgtaatgaatgctttgaccactattataggtcccacaaggatggctacgacaaatatactacctggaaaaagatctggacaagcaatggcaagaccgaaccctcccccaaagcattcatggcagaccagcagctgccttactgggtgcagtgtactaagcctgaatgccggaagtggcggcagctgactaaggaaatacagctgacaccgcagatcgcgaaaacttacaggtgtggtatgaagccaaacacagccattaagccagagaccagcgaccactgctctcttccagaggatctgagagtcttggaggtgagtaatcactggtggtattctatgcttatcctccccccattgcttaaagacagcgtggcagcccccctcttgagcgcttactatccagattgcgtcggaatgtctcccagttgcacatcaacgaatagggccgccgcgacaggtaatgcaagccccggaaaactggaacattccaaggccgcgctgagtgtgcacgttcccgggatgaaccgatatttccagcccttc

SEQ ID NO: 34 - DNA, 1341 bp, synthetic construct
  source 1..1341: mol_type = other DNA
gccaccatggattaccataacaaaagcgtgattattataggagcaggaccggcgggcctcgccgccgcccgacagctgcacaatttcggaatcaaggtgaccgtacttgaagccaaggatagaataggcggcagggtctgggacgacaagagctttaagggcgtgaccgtgggcaggggcgctcaaatcgttaacgggtgtattaataatcctgtggctcttatgtgcgaacagctcgggatttcaatgcataagttcggggaaaggtgcgaccttatccaagagggaggccggatcacagacccaacgattgacaagcggatggactttcattttaacgcgttgttggatgtcgtgtccgaatggaggaaagacaaaacgcaactgcaggatgtgcctctgggagaaaagattgaggagatttacaaagcgttcataaaggagagtggtatccagttcagcgagctcgaggggcaagtgctccagttccacttgtccaatcttgagtacgcctgcggcagcaatctgcaccaggtctccgccagaagttgggaccacaacgaattttttgcccagtttgctggagaccatacgctcctgacacccggctacagcgtaatcattgaaaaactggcggaaggtctggacatccaactgaagagccccgtgcaatgtattgactattctggagacgaggtgcaggtgactaccaccgacggcaccggctattctgcacagaaggtcctggttaccgtaccactcgcactgctgcagaaaggggcaatccagttcaacccgcctttgtcagagaagaagatgaaagctattaatagcctgggcgccggcatcattgagaaaattgctctccagttcccttataggttttgggacagcaaggtgcaaggagccgacttcttcggccatgtcccaccctccgctagtaagagaggactgttcgccgtgttctacgatatggaccctcaaaaaaagcattccgtcctgatgagtgttatcgcgggcgaggcggtggccagcgtgcgaaccctggacgacaaacaggtgcttcaacaatgcatggctactctccgagagctcttcaaagagcaggaggtgcctgatcccacaaaatatttcgtaaccagatggtccactgacccatggattcaaatggcatacagttttgtgaaaactggagggtccggggaagcctacgacattatcgcagaggatatccagggtactgtcttcttcgctggcgaggccacaaacagacacttcccgcagaccgtcactggtgcttatttgagtggtgttagagaggcttcaaagattgctgctttc

SEQ ID NO: 35 - DNA, 1758 bp, synthetic construct
  source 1..1758: mol_type = other DNA
gccaccatgtcacggtctagacacgcacggccctcacggctggtgagaaaagaagatgtcaataagaaaaagaaaaattcccaactcagaaaaactacgaaaggcgcaaataaaaatgtagcttcagtgaaaacactgagtccaggcaaactcaagcaacttattcaggagcgagacgtaaaaaaaaagactgagcctaagccccccgtgcccgtacgcagcctgctcacccgcgctggcgccgccagaatgaatctggataggacagaggtgctgtttcagaacccagagtccctgacctgcaatgggttcaccatggccctcagatccacaagcttgtctcggagactttcccagccacctcttgtggtagcaaagagcaaaaaggttcctttgagtaagggcctggagaagcagcacgactgtgattacaaaatcttgccagccttgggggttaaacactccgaaaatgattcagttcccatgcaagatacccaggtgctgcctgatattgagaccctcattggggtgcagaatccctctctgcttaaagggaagtcacaagaaaccactcaattctggagccaacgggtagaggactccaaaattaatattcccacccattctggacccgcagccgaaatcttgcccggaccactggagggcacccgctgtggtgagggtttgtttagtgaagaaaccctcaatgacacctctggctcacccaagatgttcgcccaggatacggtgtgtgcgccttttccccagcgggcaacccccaaggtgaccagccaagggaatccctccatccagcttgaagaactgggatcccgggtggagagtttgaagctgagcgacagttatttggatcccatcaaatcagagcatgactgttatcctacctcaagcctgaataaggtaattcccgatttgaaccttcgaaactgcctggcgctgggggggtctacttcccctacttcagtcatcaagtttctgttggccggcagtaagcaggctacccttggcgccaagccagaccaccaagaggcttttgaggcaactgccaaccagcaagaagtaagcgatacgacttcttttctcgggcaggcatttggggcaattcctcaccagtgggaacttcccggcgctgatccagtacacggcgaagcgctgggggagaccccagacctgccagagatcccgggcgctattcctgttcagggggaggtgttcgggaccatcctggaccagcaggaaacgctcggaatgagcggctctgtggtcccagatctccccgtcttccttcccgtccctcctaatccaattgcaacttttaatgctccaagtaaatggccagaacctcagtctaccgtgagctacgggctggccgtacagggggccatccagatcctgcctctcggttccggtcacacgcctcagagcagtagcaactctgagaagaattccctgccaccagtcatggctatctccaacgtggaaaatgagaagcaggttcatattagcttcctcccggccaatacgcaaggattccccctcgccccagagcgaggtctgtttcacgcaagtctgggaatcgcacagctgtcccaggcggggccgagcaagtccgatagagggagttcacaggtaagcgtaacaagcacggtgcacgttgtgaataccaccgttgtgactatgcccgtgccaatggtatccacatctagtagttcctacaccacactgctgcccacactggag

SEQ ID NO: 36 - DNA, 2391 bp, synthetic construct
  source 1..2391: mol_type = other DNA
gccaccatggaggaactgaagaagaagccatccgtggttgttccgttggaagtaatcaaagaaaataaaagaccacagagagaaaagaagcccaaagtgctgaaagccgattttgataacaaacccgtgaacggcccaaaaagcgaatcaatggattacagccggtgtggccatggggaggaacagaaacttgaactgaatccccacacggtagagaacgtgacaaaaaacgaagacagtatgactgggatcgaggtggaaaagtggacacaaaataagaagagccagctgactgatcatgtcaagggcgatttttccgctaacgtcccagaggctgaaaagtcaaaaaatagcgaggtcgataaaaagaggacgaagtcccccaagctgtttgttcagactgttaggaatggcattaagcatgtgcattgtttgccagcagaaacaaatgtctcttttaagaaattcaatatcgaagaatttgggaaaacgctggagaataacagctacaaattcctgaaagacaccgctaaccataaaaatgccatgtcctctgtcgcaactgacatgagctgcgatcatctgaaaggcagatctaatgtgctggtgtttcagcagcctggctttaactgcagtagtattccgcactcttcccatagtattataaaccaccatgccagcatccataatgagggagatcagccgaagacccccgagaatattccgagcaaagaacccaaggatggttcacccgttcaacccagcttgctgagcctgatgaaggataggagattgacactggaacaagtggttgctattgaagcacttacacaactctctgaggcaccaagtgagaactccagccccagcaaatccgagaaggacgaggagagtgaacaacgcaccgcgagcttgctgaactcttgcaaggcgatcctctacaccgtgcggaaagacctgcaggatccaaatctccagggtgaaccccctaagctgaatcattgtccttctttggagaagcagagcagttgcaatactgtggtgtttaacggccaaacgaccacactgtcaaattcccacatcaactctgctacaaaccaggcttctacaaagagccacgagtacagtaaggtgaccaactccctgtctctgttcatccccaaatccaattcttccaagatcgataccaataagagcattgcgcaggggattatcacactggacaattgtagtaatgatctgcaccagctgcccccccggaataatgaggtggagtactgcaaccagttgctggactcttcaaagaagctggattccgacgatctgtcatgtcaggacgccacgcacacccagatcgaagaagatgtcgccacgcaactcacccagcttgccagcatcatcaaaattaattacataaagcccgaggataaaaaagtggaatctacacctacttcactcgtcacatgcaacgtccagcaaaagtataatcaggaaaaaggcaccatacaacagaagccccctagttccgtacataacaaccatggatccagcttgacaaagcagaaaaatcccactcagaagaaaaccaagagtactccgagcagagataggagaaaaaagaaacctactgtcgtgtcatatcaagaaaacgacagacagaagtgggaaaagctttcatacatgtacggaaccatttgtgacatctggattgcatctaaatttcagaattttggccagttctgcccgcacgattttccaaccgtgtttggaaaaatttcatcaagcactaaaatctggaagccccttgcccagacacggtccatcatgcaacccaaaactgttttccctcctctcactcagataaagctgcaacgctacccggagtccgcagaggaaaaagttaaggtggagccccttgacagcctttctctgtttcatctcaagactgagagtaatggaaaagcgttcaccgacaaagcttataatagccaagtccagcttacggtcaacgctaaccagaaggcgcaccccctgactcagcccagctcccccccaaatcagtgtgccaatgttatggccggagacgatcagatccgcttccagcaggtggtgaaagaacagctgatgcaccagagactcccgaccctgccgggaatttcacacgagactccattgccagagtccgcactcacactcaggaatgtcaacgtggtatgtagtgggggtatcactgtcgtttctacgaagtctgaagaagaggtgtgtagcagcagcttcgggaccagcgagtttagtaccgtggattccgcgcagaagaatttcaacgattatgctatgaacttctttaccaacccaacgaaaaacctggtatctataaccaaagatagcgag

SEQ ID NO: 37 - DNA, 774 bp, synthetic construct
  source 1..774: mol_type = other DNA
gccaccatggcagccaccgaaattagcgttctcagcgagcagttcaccaaaattaaggaactcgagctcatgcccgaaaagggcctgaaagaagaggaaaaggatggagtctgtcgggaaaaagaccatcgctcacctagcgaattggaggctgaacggacctccggggcattccaggattcagttctggaagaggaggtggaactggtgcttgcaccaagtgaggagtccgagaaatatatcctcaccctgcagactgtccattttacttccgaggccgtggagcttcaagatatgtctctgctctcaattcagcagcaggagggagtgcaggtggtcgtgcagcagcccggccctggcctgctgtggctcgaagaaggtcccagacaaagcctgcagcaatgcgtggctatcagcatacaacaagagctctactctccgcaggagatggaggtcctgcagtttcacgccctggaggaaaatgtcatggtcgctagcgaggatagcaaattggctgtgagtctggcagagactactggactgatcaagctggaagaggagcaagaaaagaatcaactgctggctgagcgcacaaaagaacagttgtttttcgtagaaacaatgtccggagatgagcggtctgatgaaattgtcctcaccgtctccaactccaatgtcgaggaacaggaggatcagcctactgcgggtcaggctgatgcagagaaggctaagagtaccaagaaccagcgcaaaacaaagggagccaagggcact

SEQ ID NO: 38 - DNA, 276 bp, synthetic construct
  source 1..276: mol_type = other DNA
gccaccatgtcagctgcaagtggaaagggacgccggacccggaaacggaagcagacgatcctgaaggaggccactaagggccagaaagaagccgctaagggatggaaggaggctgctaatggtgatgaagcagctgcggaggaggcgtctaccactaagggcgagcagtttcccggagagatgttcccagttgcctgtagagagacgacagcccgagtgaaggaggaggtggacgaaggcgtgacatgtgagatgttgctgaatacaatggataaa

SEQ ID NO: 39 - DNA, 411 bp, synthetic construct
  source 1..411: mol_type = other DNA
gccaccatggaaatcccaaatcccccgacaagcaaatgcattacatactggaagcgaaaagtgaaatcagaatatatgaggctgaggcagctgaagaggctccaggcaaatatgggtgcgaaagcgctgtacgttgccaattttgccaaggtccaggagaagacgcaaattctgaatgaggaatggaagaagctgagagtccagccagtccagtcaatgaaacccgtttctggccaccctttcctgaagaagtgcacaatcgagagtatcttccctgggttcgcatcacagcacatgctgatgcggagcctgaacactgtcgcgctggtgccaatcatgtattcctggtcccctctgcagcagaattttatggtggaggacgagactgtcctgtgtaatattccatatatg

SEQ ID NO: 40 - DNA, 828 bp, synthetic construct
  source 1..828: mol_type = other DNA
gccaccatggagtcactgattctcaagctgccaactgatgagctcatgaacccttctcagaagaaaaaacgcaaacaccgcctgtgggccgctcattgcagaaagatccagctgaaaaaggacaactccagcacgcaggtgtataactaccagccttgcgaccatcccgatagaccctgtgattctacatgcccttgtatcatgactcagaatttctgcgagaaattttgtcagtgcaaccctgattgccagaatagattcccagggtgcagatgcaagacccagtgtaatactaaacagtgcccttgctatcttgccgtgagagagtgtgaccccgacctttgtctcacctgtggagcatcagaacactgggattgtaaagttgtgtcctgcaaaaattgtagtatccagcggggtttgaaaaaacatctgcttctggcccccagtgacgttgcagggtggggtacatttattaaggaatctgttcagaagaacgaatttatctctgagtactgcggagaacttatcagtcaggacgaggccgaccggcgcggcaaagtgtatgacaaatacatgtcaagctttcttttcaacctgaataacgactttgtggttgatgcaaccaggaaggggaacaagatacggttcgccaaccactccgttaaccccaactgctacgctaaggttgtaatggttaacggcgatcatcgcatcgggatattcgcaaaacgagcaatccaggcaggcgaggaactgtttttcgattatcgctattctcaggccgacgccctgaaatacgttgggatcgagcgagaaaccgacgttttg

SEQ ID NO: 41 - DNA, 2607 bp, synthetic construct
  source 1..2607: mol_type = other DNA
gccaccatggccgccgcagcgggagcggccgccgccgctgccgccgaaggggaggcaccagccgaaatgggagcgttgctgttggaaaaagaaacaaggggcgccactgaacgagtgcatggttccttgggcgatactcccaggtcagaagagactctgcccaaagcaaccccagactcactcgaacccgcgggcccctcaagcccagcctctgtcaccgtcacggttggtgacgagggcgccgatacacccgttggcgcaactcccctcataggtgatgaaagtgaaaacctggagggggacggtgatctccggggcggccgaatcctcctgggacacgctactaaatccttcccctcctcaccttccaaggggggatcctgtccatcacgcgccaagatgagtatgaccggcgctgggaagagtccaccttcagtacagtctttggctatgcgactcttgtcaatgcccggagctcagggcgctgccgcagccggttctgagcctccccctgcaacgacctcaccagagggacagccaaaggtccatcgggcacgaaaaacaatgtcaaaacctggtaacggtcaaccaccggtccctgaaaagcgccccccggaaatccagcatttcaggatgagcgacgacgtgcactctctgggaaaggttacctctgacctcgccaaacggagaaagctgaacagtgggggcggccttagtgaagagctgggctctgccagacggagcggcgaagtaactctgaccaagggcgaccctgggtccctggaggagtgggaaaccgtcgtcggcgatgacttcagcctttattatgacagctactccgtcgacgagcgcgtcgacagcgacagtaaatccgaggtggaggcgctgactgaacagctgagcgaggaagaggaggaagaagaagaggaggaggaggaggaagaggaggaggaggaagaagaggaggaggaagaggatgaggaatctggcaaccagtccgacagatctggttcaagcggccgacgaaaagccaaaaaaaaatggagaaaggacagcccatgggtgaagccaagtcggaagcggcggaaaagggaaccacccagggctaaggaacctcggggagtcagcaacgatacctcttccttggaaacggaacgcggcttcgaggagctgccactctgcagttgtaggatggaggcaccaaagattgaccgcattagcgagcgggcaggtcacaaatgcatggcgaccgagagtgtggacggggagctgtccggatgcaatgcagccatccttaaaagggaaacgatgcgcccgagttctcgcgttgcactgatggtgttgtgcgagacacaccgggcacggatggtgaagcaccactgttgcccaggctgtggctatttttgcaccgccggaacctttctggagtgtcacccggatttccgcgtcgcccaccgctttcacaaagcgtgtgtaagccagcttaatggcatggtgttttgtcctcattgtggagaagatgcctcagaggcccaagaagtgacaatcccacgaggagacggcgtgaccccacccgccggcaccgcggcaccggctccaccacccctgtcccaggacgtgcccggtagggccgacacttcccaacctagtgcaaggatgcggggtcatggggaaccgcggcgcccgccttgcgatccactcgcagatacaattgacagcagcggcccttctctgaccctgccgaatggaggatgcctgtctgcagtgggtctgcctctcggacctgggagagaggcattggaaaaagccttggtgatccaggagagcgaaagaagaaaaaagctgcggttccatcccagacagctctatctttctgtgaaacagggtgagttgcaaaaggtcatacttatgttgctcgataatcttgacccaaactttcagagtgaccagcagtcaaagcggacccctctgcatgccgcagctcagaaaggctccgtagaaatttgtcatgtgctgctgcaagctggtgccaacatcaacgccgtagataagcagcagcggacaccactgatggaggccgtggtcaacaatcatctcgaagtcgctcggtacatggtccaacgcggcgggtgcgtttattctaaggaggaggatggaagtacctgcctgcaccacgctgccaaaatcggaaatcttgagatggtatcactgctgctttcaaccgggcaggttgacgttaacgcgcaggactcaggaggctggactcccatcatttgggcagcggaacacaaacatatcgaagtgatacggatgctgctcacgaggggggcagatgtcactctgacagacaacgaggagaatatctgccttcactgggcttccttcaccggatccgcagccattgccgaagtgcttctcaacgctcgctgtgacctgcacgccgtaaattatcacggagatacgcctctgcatatcgccgcaagggaatcttaccacgactgtgttcttttgtttcttagccggggggcaaacccagaactgcgcaacaaggaaggagatactgcctgggatctcactccagagcggtcagatgtgtggttcgctctg

SEQ ID NO: 42 - DNA, 1890 bp, synthetic construct
  source 1..1890: mol_type = other DNA
gccaccatggccgccgccggagctggtcctgggcaggaggctggcgcggggcctggcccaggcgccgttgctaatgccactggggcggaagagggagagatgaaacctgtggcggctggtgccgctgccccaccaggcgaggggatctctgccgcaccaacggtcgaacctagctctggcgaggctgaggggggcgaggctaatctcgtcgacgtgtctggaggcttggagacggaatcctctaacggcaaagacactctggaaggggctggcgacacttctgaagtcatggacacacaggcagggtctgtcgacgaggagaatggcaggcagctcggcgaagtggaactgcagtgcggcatttgcacaaagtggtttaccgcggatacgttcggcatcgacacaagcagctgcctgcccttcatgaccaattactcattccactgtaacgtatgccaccattcagggaatacttacttccttagaaagcaggccaacttgaaggagatgtgtctctctgcccttgctaacttgacctggcagtcacgcactcaggacgaacaccccaaaacgatgtttagtaaagataaagatatcatcccatttatagacaaatactgggaatgtatgaccacacgccagagaccagggaaaatgacctggccaaataatatcgtaaaaacaatgtctaaggagcgggacgtgttcttggttaaggaacatcccgaccccgggagtaaggacccggaggaggattacccaaagtttggcctgctcgaccaggatctttcaaacatcggacccgcttacgacaaccagaaacagtcctccgccgtttctacctctggtaacctgaacgggggtattgctgcgggttctagcggaaaaggccgaggtgctaaaagaaaacagcaagatggtggtactaccggaactacaaagaaagcgcggagcgacccactgttctccgcccagcgccttcccccccatggctaccccctggagcaccctttcaacaaagatgggtacaggtatatactggcggaaccggacccccacgcccctgatccagagaagcttgagttggactgctgggcaggcaaacccatcccaggcgacctgtacagggcttgtttgtacgagagagtgcttctggcattgcatgaccgcgcaccccagctcaagatctctgatgatcgcctgactgtcgtcggggaaaaaggctacagcatggtaagagcgtcccatggggttaggaagggagcgtggtatttcgaaatcactgtagacgagatgccgcctgacaccgctgcgaggctcggttggtcccagccactgggtaatctgcaggctcctttggggtacgataaattcagttactcttggagatccaagaaaggcactaagttccatcaatcaattggaaagcattactccagtggctacggccaaggagacgtgctgggcttttacattaacctgcccgaagacactgagacagccaagagcctgccagacacatacaaagacaaagcactgatcaagtttaagagctacttgtattttgaagaaaaggattttgtcgataaagcggaaaagtcccttaagcagaccccgcatagtgaaatcattttttataagaatggcgtaaatcagggagtggcgtacaaagatatcttcgagggcgtctattttcccgccatatccctctataagtcctgcaccgtgtctatcaatttcggcccatgctttaagtacccacccaaagatcttacatacagacctatgtctgatatggggtggggggccgtcgtggaacacaccctggccgatgttctttaccacgtggaaacagaggtagatggcaggcgatcccccccgtgggaacct

SEQ ID NO: 43 - DNA, 1989 bp, synthetic construct
  source 1..1989: mol_type = other DNA
gccaccatggttcttaccctcggcgagagctggcccgtattggtgggcaggagatttctgtccctgtccgccgctgacggctccgacggcagccacgattcttgggacgtcgagcgcgtggcagagtggccatggctgagcggaacgatcagggctgtctctcacacagacgtcacaaaaaaggacctgaaggtttgcgtcgagtttgacggggaatcctggagaaaacggaggtggattgaggtctattctctccttaggagagccttcctggtcgagcataatttggttcttgcggaacgcaagtctcccgagataagcgagcgcatagtgcagtggccagctatcacatacaagcccctcctcgataaagcgggcctgggaagtattacaagtgtgcgctttctgggggaccagcagcgggtgtttctctccaaggatttgctgaagcccatacaagatgttaacagcttgaggctgagtctgacagataaccagattgtgtccaaagaatttcaagccctcattgtaaaacatctggacgagtcccacctcctcaaaggggacaagaacctggtgggctccgaggttaagatctatagtttggatcctagcacccagtggttctccgctaccgtcatcaacggcaatcctgcttccaaaactcttcaggtcaattgtgaggagatccccgcccttaaaattgtcgatccgtccctcatccacgtggaagtggttcatgacaacctggtcacatgcggcaactctgcccggatcggggccgtgaaacgcaagtcaagcgagaacaatggcactctggtttcaaagcaggcaaaatcctgctcagaagcatctccctctatgtgtcctgtgcaaagtgtaccaactacagttttcaaagagatcctccttgggtgcaccgctgcaacccccccaagcaaagatccgcgccagcagagcactccccaagctgccaactctccgccaaacctgggcgccaaaatcccccagggttgccataaacagtctctgcccgaagagattagtagctgccttaacacaaaaagtgaggcacttcggacaaaacccgacgtgtgtaaagcgggactgctctcaaagtcttcccaaatcggaacaggcgatttgaagattctgacagagcccaaaggatcttgcacccaaccaaagaccaataccgaccaggaaaacaggttggagagcgtgccccaggctcttacgggtctgccgaaagagtgtttgcccacgaaagccagcagcaaagccgagcttgaaattgccaatccccctgaacttcaaaagcatctggagcacgccccaagcccaagcgatgtgagcaacgctccagaagttaaggccggagttaacagtgacagccctaacaattgctcaggtaagaaggtggagccctctgccttggcttgccggagccagaacctcaaggagagtagcgtgaaggtggacaatgaatcttgctgctcccgctctaataataagattcagaatgccccatcccgaaaaagcgttctgactgatccagctaagctcaaaaagctgcaacagagtggcgaagccttcgtccaagacgactcatgtgtgaacatcgtcgcccaactgcctaagtgcagggagtgccgcctcgactccctgcggaaagacaaggagcaacagaaagactcacccgtgttctgtcgcttctttcatttccggcgcctgcagttcaacaagcatggcgttctgagagtcgaaggtttcttgacacctaacaagtatgataacgaagccatcgggctgtggctgcccttgacaaagaacgttgtcggcatagacctcgatacagccaagtatatcctcgctaatataggggatcacttctgccagatggttatcagcgagaaggaggctatgtctacaatagagccacaccggcaagtggcctggaagcgggctgtcaaaggcgtgcgcgagatg

SEQ ID NO: 44 - DNA, 2742 bp, synthetic construct
  source 1..2742: mol_type = other DNA
gccaccatgcccgccatgccctccagcgggcctggggatacctctagttctgctgcggagagggaggaggatcggaaagatggggaggagcaggaggaaccacgaggaaaagaagagcgccaagagccgagcaccaccgcgcgcaaagttggtaggcccggtcggaaaagaaagcacccaccagtcgagagcggagacacgccaaaagatccagctgttatctcaaagtccccaagtatggcccaagactctggggccagtgagctcctccctaatggtgatttggagaaacgctcagaaccacagccagaagagggatctcccgctgggggccaaaagggaggggcacctgcagagggtgagggagccgccgaaactctgcctgaagcttctcgcgcagttgagaatgggtgctgcacgcctaaggaggggagaggagcacccgccgaagctggaaaagagcagaaggagaccaacattgagtccatgaaaatggagggcagccgcggcaggctgagaggagggctcggttgggagtcctctctgcgccagagacctatgccacgcttgacatttcaggctggggacccatactatatctctaaacgcaaacgggacgagtggctggccagatggaagcgcgaggcagaaaaaaaggcgaaagtaatagcgggcatgaatgctgtggaagaaaaccagggcccgggcgagtcacagaaggtggaggaggcctcaccgcctgctgtgcagcaacctactgacccagcttcacccacagtggctacaacgccagaacctgtagggagtgacgccggggataagaacgctactaaggccggggacgacgagcccgaatatgaagatgggagaggctttggaattggagagctggtatggggcaagctccgggggttcagctggtggcccgggcgcatcgtgagctggtggatgacaggcagaagtagggcagctgaaggaactaggtgggtaatgtggtttggggatgggaagttttccgttgtgtgtgtggaaaagctcatgccgctgtcctccttctgttctgcctttcaccaggcgacttacaataagcaaccaatgtatcgcaaggctatctacgaggtccttcaggtggccagttcaagggctggcaaactgttcccggtctgtcatgatagcgatgaatcagacaccgcgaaagcagtggaagtgcagaacaagcccatgattgagtgggctctcggcggcttccagcccagtggtccgaagggattggaacctccagaagaagagaaaaatccttataaagaagtttacaccgacatgtgggtcgaacccgaggctgccgcctatgcacctcccccaccggcgaagaagccccggaaaagtacagctgaaaagccgaaagtaaaggaaatcattgacgagcggactagggagagattggtgtatgaggtccggcagaagtgcagaaacatagaggacatctgtataagctgcgggagccttaatgtgactctggagcatcctctcttcgtaggcggaatgtgtcagaattgcaagaattgctttctggaatgtgcctaccagtacgacgacgacggttaccaaagttactgtacaatatgctgcggcggacgggaggtgctcatgtgtggaaataacaactgctgtcggtgtttctgtgtggagtgtgtggacctgctggtgggacctggggccgcacaagcagcaattaaagaggatccctggaactgttacatgtgcggtcacaaggggacatacggattgctgaggcgaagggaagattggccaagtcgactgcaaatgttcttcgctaacaatcacgatcaagagtttgacccacccaaggtctaccctccagttcctgccgagaagcgcaaacccattagagtgctgtccctgtttgacgggatcgctaccggtctgctggtgctgaaggacctggggattcaggtcgatcgatacatcgcctccgaagtatgtgaggactcaataaccgttggtatggtgagacaccagggaaaaatcatgtacgttggggatgttcgctcagtcacccagaaacatatccaggagtggggacccttcgatttggtaatcggagggtccccctgcaatgatctttctattgtgaatcctgctcgaaaaggcctgtacgaggggactgggaggctgttttttgagttttaccgcctgctgcacgatgccaggccaaaagaaggggacgacaggccattcttctggctcttcgaaaacgtagtggccatgggagtgtccgacaagagagatattagcagattcctcgagagtaatccggtcatgattgatgccaaagaagtatctgctgctcaccgagcccgatacttctgggggaacctgcccggcatgaatcggcccctggcaagtacagtgaatgataagctcgaactgcaggagtgcctggagcacggcagaattgcaaagttcagcaaagtccgcactataacaaccaggtccaactctatcaaacaaggcaaagaccagcacttcccagttttcatgaacgagaaggaggacatcctgtggtgcactgaaatggagcgcgtatttgggtttccagttcattacaccgatgtaagcaatatgagccgcctcgcaagacagagattgctcggaagatcatggagtgtacccgtgattaggcacctctttgcccctttgaaggaatatttcgcttgcgtc

SEQ ID NO: 45 - DNA, 222 bp, synthetic construct
  source 1..222: mol_type = other DNA
gccaccatggacgctaagagtttgacggcctggagtcggaccttggttacgtttaaggatgtctttgtcgactttacgcgcgaagaatggaagctgttggatacagctcagcagattgtgtataggaatgtgatgctcgaaaactataagaacctcgtctccttgggctaccagctcaccaagcccgacgtcatacttaggctggagaagggcgaagaacct

SEQ ID NO: 46 - DNA, 1860 bp, synthetic construct
  source 1..1860: mol_type = other DNA
gccaccatgatctttaagccagaagagctccggcaggcactgatgcctaccttggaagccctctatagacaggacccagagtcactgccgtttaggcagccagtggatcctcagctgctggggattcctgactacttcgatattgtcaagagtcccatggaccttagtaccatcaagcgcaaactcgacacgggccaataccaggaaccatggcagtatgtggatgatatctggctgatgttcaacaacgcgtggctgtacaaccggaagactagccgcgtttataagtactgtagtaagctctccgaagtgttcgagcaagagatcgaccccgtcatgcagagcctgggctactgctgtggtcggaaactggaattctccccccaaactctttgctgctatggtaagcaactgtgtaccatccccagagatgcgacttattattcttaccaaaataggtatcatttctgtgagaaatgcttcaacgaaattcagggagaaagcgtgtccctgggagatgacccgtctcagccgcagaccacaatcaacaaagagcagttttcaaaacggaaaaacgatacactcgaccctgagctgtttgtagaatgcaccgaatgcggaaggaagatgcaccaaatctgcgtactgcaccatgagattatctggcctgctggctttgtctgcgacggctgcctcaagaagtctgctcgaacgcgaaaggagaacaagttttctgccaagagactgcccagtacgagactcggtacgttcctggagaatagagtaaatgactttctgaggagacaaaaccacccggagtccggggaggtcactgttcgggtggttcacgccagcgataagacagtggaagttaagcctggcatgaaggccaggttcgttgattctggcgaaatggccgaaagcttcccttaccgaactaaggcactctttgcatttgaggaaatcgacggcgttgatctgtgtttttttgggatgcacgtccaagaatatgggtccgactgcccacctccgaatcagcgcagagtatacatcagctacctggactccgttcacttctttcgacccaagtgtttgcggacagcagtataccacgaaatcctgataggctatctcgagtatgtgaaaaaactgggatacacgacgggccacatatgggcctgtccaccctcagaaggggacgattatatttttcattgccatccccccgaccagaaaatcccaaaacccaagagactccaggagtggtataagaagatgctggacaaggcggtctctgaacggattgtccacgattacaaagacatctttaaacaggccaccgaagatagattgactagcgccaaagagctgccgtattttgaaggcgacttctggcctaacgtgctggaggagtcaatcaaggaactggagcaggaggaagaggagcgaaaacgggaggaaaatacgagtaatgagtccacagacgtgaccaagggtgacagcaaaaacgccaagaagaaaaacaacaagaaaacgtctaaaaacaagtcctcactgagtcgaggcaataagaaaaagccggggatgcccaacgtgtccaatgacctctcccagaaactgtatgcaactatggagaaacataaagaggtgttcttcgtgataagactgatcgcaggccccgcagccaattctctgcctcccatagtcgacccggacccccttatcccgtgcgacctcatggacgggagagatgcatttctcaccctcgctcgagacaagcacttggagttttccagcctcaggagagcacaatggtcaaccatgtgtatgctcgtcgaactgcatacccaaagccaagat

SEQ ID NO: 47 - DNA, 912 bp, synthetic construct
  source 1..912: mol_type = other DNA
gccaccatgaaccatgatcaggagttcgatccccccaaggtctaccctccagtgccggccgagaagaggaagcccatacgcgttttgagcctcttcgatgggatcgcgacaggactcttggtgctcaaggatctcggcattcaggtggatcggtatatcgcctctgaggtgtgtgaagactccattactgtcggaatggttcgccatcagggaaagatcatgtatgtcggcgacgtgcgctccgtgacccagaagcatattcaggaatggggacctttcgatctggtgatcgggggatccccttgtaatgacctcagtatagtgaacccagccaggaagggtctttacgagggaacgggaaggctgttctttgagttttataggctcctgcacgatgcaaggccaaaagagggggacgatagaccgtttttttggctgtttgaaaacgtggtggccatgggagtttctgacaagcgggacatcagcaggttcctggagagcaatcccgtgatgatcgacgctaaggaggtcagcgcagctcatcgcgcccgatatttctgggggaacctccccgggatgaaccgccccctcgcttctacagtaaacgataaacttgaactgcaagagtgccttgaacacggccgcatcgccaagtttagtaaggtccgaaccatcacaacccgctcaaattcaatcaagcaaggcaaggaccagcactttcccgtgttcatgaatgagaaggaggacatcctgtggtgtaccgagatggagcgcgtcttcggcttcccggtccactatacagacgtcagcaatatgagtcggctggcccggcaaaggttgctgggtaggtcttggtctgtgccagtgatccgacacctgtttgcccctttgaaggaatacttcgcgtgtgta

SEQ ID NO: 48 - DNA, 1557 bp, synthetic construct
  source 1..1557: mol_type = other DNA
gccaccatggatgccctcgacgatttcgatctggatatgctcgggagcgatgccctcgacgacttcgatctggatatgcttggcagcgatgccctggatgactttgatctggacatgctcggcagtgatgctctggatgatttcgatctggacatgctgatcaattctaggtcttcaggatctggttcccaatatcttcccgataccgacgatcggcaccggatagaagagaaaaggaagcggacctatgaaacatttaaatccatcatgaagaagtctccgttttcagggccaacggaccctcgccccccgccacgacgaatcgcagtgccatctagatctagtgccagcgttccaaagcctgctccccagccctaccctttcacctctagcttgtcaacaatcaattacgacgagtttcccaccatggtgttccccagcggtcaaatttcacaggcctccgcccttgctcctgcccccccacaggtgcttccccaggctcctgcccctgctcccgctcccgcaatggtgtccgctctggctcaggctccagcccctgtgccagtgctcgcacccggaccgccacaggccgtagctccacccgcccctaaaccgacccaggccggagaaggaactctgagcgaggccttgctccagttgcaatttgatgatgaagatttgggagcactgctgggtaactccacggaccccgcggtgtttacagatctggccagcgtggacaatagcgaatttcagcagctgcttaaccaggggattccagtggccccacacacgacagagccgatgttgatggagtaccctgaagccatcacaagacttgtaacgggggcccagagaccacccgatccggcgccagcccctctgggtgcacccgggctcccaaatggacttctgtccggcgacgaggacttctccagcatcgctgacatggacttttctgctctgcttggtagtggatctggaagtagggactccagggagggaatgtttctgccaaagcctgaggccggcagcgcaatatctgacgtgtttgaagggcgggaggtgtgccagccaaagaggatacgaccttttcacccccctggaagtccctgggccaaccgcccattgccagcttcactggctcccacccctaccggcccagttcacgagccagttggcagcctgacccccgccccggttcctcagccactggacccagcacccgccgtgacccccgaagcaagccacctcctcgaagaccctgatgaggagacgagccaagccgttaaagccttgagagaaatggccgatactgtcattcctcagaaggaggaggcagctatatgtggtcagatggacctgagccaccctccccctaggggacacctggatgaactcacaacaactctcgaaagtatgaccgaagatctgaatctggatagccccctgaccccagaactgaacgaaatcctggacacctttctgaatgacgagtgtctcctgcatgctatgcacataagtacaggactgagcatatttgacaccagtctgttt

SEQ ID NO: 49 - DNA, 2163 bp, synthetic construct
  source 1..2163: mol_type = other DNA
gccaccatgctgcccacctgcagctgtcttgatcgagttatacaaaaagacaaaggcccatattatacacaccttggggcaggaccaagtgttgctgctgtcagggaaatcatggagaataggtatggtcaaaaaggaaacgcaataaggatagaaatagtagtgtacaccggtaaagaagggaaaagctctcatgggtgtccaattgctaagtgggttttaagaagaagcagtgatgaagaaaaagttctttgtttggtccggcagcgtacaggccaccactgtccaactgctgtgatggtggtgctcatcatggtgtgggatggcatccctcttccaatggccgaccggctatacacagagctcacagagaatctaaagtcatacaatgggcaccctaccgacagaagatgcaccctcaatgaaaatcgtacctgtacatgtcaaggaattgatccagagacttgtggagcttcattctcttttggctgttcatggagtatgtactttaatggctgtaagtttggtagaagcccaagccccagaagatttagaattgatccaagctctcccttacatgaaaaaaaccttgaagataacttacagagtttggctacacgattagctccaatttataagcagtatgctccagtagcttaccaaaatcaggtggaatatgaaaatgttgcccgagaatgtcggcttggcagcaaggaaggtcgacccttctctggggtcactgcttgcctggacttctgtgctcatccccacagggacattcacaacatgaataatggaagcactgtggtttgtaccttaactcgagaagataaccgctctttgggtgttattcctcaagatgagcagctccatgtgctacctctttataagctttcagacacagatgagtttggctccaaggaaggaatggaagccaagatcaaatctggggccatcgaggtcctggcaccccgccgcaaaaaaagaacgtgtttcactcagcctgttccccgttctggaaagaagagggctgcgatgatgacagaggttcttgcacataagataagggcagtggaaaagaaacctattccccgaatcaagcggaagaataactcaacaacaacaaacaacagtaagccttcgtcactgccaaccttagggagtaacactgagaccgtgcaacctgaagtaaaaagtgaaaccgaaccccattttatcttaaaaagttcagacaacactaaaacttattcgctgatgccatccgctcctcacccagtgaaagaggcatctccaggcttctcctggtccccgaagactgcttcagccacaccagctccactgaagaatgacgcaacagcctcatgcgggttttcagaaagaagcagcactccccactgtacgatgccttcgggaagactcagtggtgccaatgctgcagctgctgatggccctggcatttcacagcttggcgaagtggctcctctccccaccctgtctgctcctgtgatggagcccctcattaattctgagccttccactggtgtgactgagccgctaacgcctcatcagccaaaccaccagccctccttcctcacctctcctcaagaccttgcctcttctccaatggaagaagatgagcagcattctgaagcagatgagcctccatcagacgaacccctatctgatgaccccctgtcacctgctgaggagaaattgccccacattgatgagtattggtcagacagtgagcacatctttttggatgcaaatattggtggggtggccatcgcacctgctcacggctcggttttgattgagtgtgcccggcgagagctgcacgctaccactcctgttgagcaccccaaccgtaatcatccaacccgcctctcccttgtcttttaccagcacaaaaacctaaataagccccaacatggttttgaactaaacaagattaagtttgaggctaaagaagctaagaataagaaaatgaaggcctcagagcaaaaagaccaggcagctaatgaaggtccagaacagtcctctgaagtaaatgaattgaaccaaattccttctcataaagcattaacattaacccatgacaatgttgtcaccgtgtccccttatgctctcacacacgttgcggggccctataaccattgggtc

SEQ ID NO: 50 - DNA, 927 bp, synthetic construct
  source 1..927: mol_type = other DNA
gccaccatgtggaaactccagctgcatgaacttacaaagctgccagcctttgtgcgggtcgtgtccgcaggtaatctgctgagccatgtgggacatacaatccttgggatgaacacagtacagctgtatatgaaagtgcccggctccagaacccctggccaccaggagaataacaacttctgttctgtcaatatcaatattggtcccggtgactgtgagtggttcgtcgtgcccgagggatattggggagtattgaacgatttctgcgaaaagaacaatctcaacttcctgatgggctcctggtggcccaaccttgaagacctgtacgaggcaaacgtgccggtctacagattcattcaacgccccggcgacctcgtctggattaatgcagggactgtccactgggtccaggccatcggttggtgtaataacatagcttggaatgtgggaccactgactgcatgccagtacaagttggccgtggagcggtatgagtggaacaagttgcagagcgtgaaatccatcgtgccgatggtgcacctgtcctggaatatggccagaaacataaaagtgtccgatcctaagctgttcgagatgattaagtactgtttgcttcgcactctcaaacaatgtcagaccttgcgcgaggccctgatcgccgcaggcaaagaaattatctggcacggccgaaccaaggaggagcctgcccattattgttcaatatgtgaagtagaagtttttgacctgctttttgtgaccaacgaatcaaattcaaggaaaacctatatagtgcactgtcaggattgcgctaggaaaacaagtgggaatttggaaaactttgtagtgcttgagcagtataagatggaagacctcatgcaggtgtatgatcagtttacactcgcaccccctctcccaagcgcatcttca

SEQ ID NO: 51 - DNA, 936 bp, synthetic construct
  source 1..936: mol_type = other DNA
gccaccatgcagctgaaccggaaactgcggcttggcgtggggaatcgcgcgatccgaaccgagaagatcatttgcagggatgtggccaggggatatgagaatgtgccgattccttgcgtgaatggagtcgacggtgaaccttgcccggaggattataaatacatttctgagaactgtgagacttccactatgaacattgaccgcaacataacacaccttcagcattgtacctgtgtggacgattgttccagctctaattgcctgtgcgggcagctcagcatccgctgctggtacgataaggatggtaggcttctccaggagtttaataaaattgagcctcctctgatttttgaatgcaatcaggcttgctcttgctggaggaactgtaaaaacagggtggttcagtcaggaatcaaagttcggctgcagctctacagaaccgctaagatgggctggggcgtgagggctctgcaaaccatcccacaggggacttttatttgtgaatatgtgggtgagctgattagcgacgctgaggccgatgtacgggaggatgacagctacctgttcgacctcgacaataaagatggggaggtatattgcatcgatgccagatactacggcaacatctcccgcttcatcaatcacttgtgtgatccaaacataattcccgtgagggtgtttatgttgcatcaggatctgcgatttccccgcatcgcttttttcagttctcgcgacatccggacaggggaagagcttggatttgattatggggataggttctgggacatcaaatcaaaatatttcacatgccagtgcggatccgagaaatgtaagcactctgctgaggctattgcccttgagcaatctcgactcgctcggctcgacccccaccctgagctcctgcctgaacttggatctctgccacctgtgaacacc

SEQ ID NO: 52 - DNA, 1911 bp, synthetic construct
  source 1..1911: mol_type = other DNA
gccaccatgtatcggatgaaaagaaagaattgccagcagggcgcagcatataagaccttttcctggttgaagtgcgtgaagtcacagattcacgagccagaaaacctgatgccaacccagataatcccagggaaggccctctacgatgtcggcgatatcgtgcactccgtgcgcgccaagtggggcattaaagcaaactgcccttgttccaaccgccagttcaaattgttctccaagcccgccagcaaggaagacctgaagcagaccagcctcgcaggggagaagcctacactcggtgctgtactgcagcagaatccaagtgttttggagccagctgccgtagggggtgaagccgctagcaaacctgccgggtccatgaagcccgcctgccctgcgtctacatctcctcttaattggcttgcagatctgacttcaggcaacgtcaacaaagagaacaaggagaaacagcccactatgcctatactgaagaacgaaattaaatgccttccacccctgccacccctctccaagagcagtactgttctgcacaccttcaattctacgattctcacgcccgtctctaacaacaactccgggtttttgcgcaacttgctgaattcctccacgggcaaaacagaaaatggcctcaaaaacacccctaagatcctggacgacatcttcgcaagcctggtccagaacaaaaccacatctgatctgtcaaaacgcccacagggtctgaccattaagccttccatactcgggtttgatactccccattattggctctgtgataatcggctgctctgtctgcaggatccgaataacaagtctaattggaacgtgttcagagagtgctggaagcagggccaacccgtgatggtgagtggcgtccaccacaagcttaactccgagctgtggaaaccagaatctttccggaaggaatttggtgagcaagaagtggacctcgtgaactgtagaactaatgagattataacaggagccacagtgggagatttctgggacgggttcgaggatgttcccaacagactcaaaaatgagaaggaacctatggtgctcaaactgaaggactggcccccaggcgaagatttccgcgacatgatgcctagccgcttcgacgacctcatggctaacatccctttgcccgagtacaccaggagagacggaaagctgaatctcgcttctcgactcccaaactacttcgttcggcccgatctgggccccaagatgtataacgcatatggcctgattacacctgaggacaggaaatatggcacaacaaatctgcacttggatgtttccgatgcggctaacgttatggtgtacgtgggcattcccaaaggacagtgtgagcaggaggaagaggttctgaagaccatacaggacggcgatagcgatgagcttaccatcaaacgctttatagagggaaaagagaagccaggagccttgtggcatatctacgccgctaaggacactgaaaaaatccgcgaatttctgaagaaggtttccgaggagcaggggcaggaaaaccccgccgatcacgacccaattcacgatcagtcttggtatctggaccgctccctgaggaaacgcttgcatcaagagtacggcgtgcaaggttgggcaatagtgcagtttctcggagatgtcgtgtttattccagccggtgcgcctcaccaagtgcacaatctgtactcctgcataaaagtggccgaggattttgtctcccccgaacacgtcaaacattgtttttggctgacacaggaattccggtatctgtcccagacccatactaaccatgaagacaagctgcaagtgaagaatgtaatctaccatgcagtgaaagacgctgtggcaatgctcaaagcaagtgaatctagcttcggcaaaccg

SEQ ID NO: 53 - DNA, 2754 bp, synthetic construct
  source 1..2754: mol_type = other DNA
gccaccatggtgcaaaaagagagtcaggcaaccctcgaagagagggagagcgagctttcaagcaatcccgccgcgtcagccggcgctagcctggagcctcctgccgctcctgcccccggcgaggataaccccgccggagctggcggggcagctgttgcaggtgcggccgggggggccagacgcttcctgtgcggcgtggttgaaggattttatgggcggccctgggtgatggaacagcggaaggagttgttccgacgcctgcaaaagtgggagctcaatacttacctgtacgccccaaaagatgactataagcataggatgttttggcgagagatgtatagcgtggaggaggccgagcagctgatgaccctgatcagcgccgctcgggagtatgagatcgagttcatttatgcaatttcccccggtcttgacatcaccttcagcaaccccaaggaggtaagcacgctgaagaggaagctggatcaggtcagccaatttggttgccggtccttcgctctgctgttcgatgacattgaccataacatgtgtgcggctgataaagaagttttcagctcatttgcgcatgctcaggtcagcatcaccaatgaaatctatcaatacctgggagagcctgaaacctttctcttctgccctaccgagtactgtggcacattttgttaccccaatgtttcacaaagtccatatttgagaacagtgggggaaaaactgttgccgggtatcgaggtactgtggaccgggcctaaagtagtgtccaaggaaatcccagtggaatctatcgaggaagtgtccaagataataaaacgcgcgcccgtcatttgggataacattcacgcaaacgactacgatcagaaaaggctgtttctgggaccttataagggcaggtcaacagaactgattccacggctgaagggagtgttgactaatcctaactgtgagtttgaggctaattatgtcgcgattcacacgctggctacttggtataaatccaacatgaatggggtgagaaaagatgtcgtgatgacagatagtgaggattctacagtgtcaatccagatcaaactggaaaacgaagggtccgatgaagatatcgaaacggacgtcctgtatagccctcagatggcactgaaactggctctgaccgagtggttgcaggagtttggtgttcctcatcagtattcaagtaggcaagttgctcattccggtgccaaggccagcgtcgtcgatggcactcccttggttgcggctccttctctcaacgccactaccgtggtgaccacagtgtaccaggagcctattatgtcccagggagctgccctctccggagagccaaccactctgactaaggaagaagaaaagaaacaacctgacgaagagccaatggatatggtcgttgagaaacaggaggaaaccgatcacaagaatgataaccagatcctttccgagatcgtggaagctaaaatggccgaggagcttaaacctatggataccgataaggagtccattgcggagagtaaaagccctgaaatgtctatgcaagaagattgtatctctgatatagctcctatgcaaacggacgagcaaactaacaaagaacagtttgtgccaggtcccaatgaaaagccactctacaccgcagaacccgtgacactcgaagatctccagctcctggcagatttgttctaccttccatacgagcacggcccaaaaggggcccagatgctgagggaatttcaatggctgcgcgccaacagttctgtcgtgagcgttaattgtaaagggaaagatagcgagaagattgaagaatggcgcagccgagccgccaagtttgaagagatgtgcgggcttgttatggggatgttcacacgcctgtccaattgtgcaaataggaccattctgtacgatatgtacagttatgtgtgggacataaagtcaataatgtcaatggtgaaatcttttgtgcagtggctgggatgccgaagccacagttctgcacagttcctcataggggaccaggagccatgggcatttcgcggagggctggccggggagtttcagcgactcctgcctatcgacggcgctaacgacctgttttttcagccacccccattgacacccacgagcaaggtttacaccataagaccctattttcccaaggacgaggctagcgtttataagatttgtcgcgaaatgtatgatgacggagtgggactgccattccaatctcagccggatctcatcggggataaactggtggggggcctcctgtccctctcacttgattactgttttgtcttggaagatgaagacggaatctgtggttacgctctggggacagttgatgtgactcccttcatcaaaaagtgcaaaatctcttggatacctttcatgcaagaaaaatacaccaaacccaacggcgacaaagaattgagtgaggccgagaagataatgctgtcattccacgaggagcaggaagttctcccggaaacattcctggcaaatttcccgtccctgattaagatggatatccacaagaaagtcaccgacccaagcgtggccaagtcaatgatggcctgtttgctgtcttctctgaaggcaaacgggagtagaggagcgttctgcgaggtgagacccgatgacaagcggattttggagttctacagtaaactcggctgtttcgagatagcaaagatggaagggtttccgaaagacgtcgtgatcctgggaaggtccttg

SEQ ID NO: 54 - DNA, 2523 bp, synthetic construct
  source 1..2523: mol_type = other DNA
gccaccatgagtagcgccgcagagcctcctccgcctccccccccggaatctgcccccagtaaacccgctgcaagcatcgctagcggcgggtcaaatagcagtaataagggaggccccgaaggagtagccgctcaggcagtagcctctgcagctagcgccggaccagcagatgccgaaatggaggaaatcttcgatgatgcgagccctggcaagcagaaagaaatacaggagcctgacccaacatatgaggagaagatgcagacagatagagcaaaccggtttgagtacctgcttaagcagaccgagctgttcgcacacttcattcaaccagccgcccagaaaacccctacttcacccttgaaaatgaagccagggcggccccggattaaaaaagatgagaaacagaatctgctctctgtcggcgactaccgacatcggcgaacagagcaggaagaggatgaagaactgcttacagagtcctccaaagccactaacgtgtgtacccgctttgaggatagtccgagctatgtaaagtggggaaagctccgagactatcaggttaggggccttaattggctgatctccctctatgaaaacggaataaatgggattcttgctgacgagatgggcctgggtaagacgctgcagaccattagcctgcttggatacatgaaacactataggaacatcccagggccacacatggtgctcgtgcccaagagtactctccataactggatgagcgagttcaagaggtgggttcctaccctgcgctcagtctgcctgatcggcgataaggagcagagagctgcgtttgtgcgcgacgttctcctgcccggggaatgggacgtatgtgtgacttcttacgagatgctcattaaggaaaaatctgtcttcaaaaagttcaactggagatacctggtgatagacgaggcacacaggattaagaatgaaaaatccaagttgagcgagattgttcgagaatttaagactactaatagactccttctgactggcaccccactgcaaaacaaccttcatgaactgtggagcctgttgaacttcttgctgccagacgtgttcaattctgccgatgatttcgactcctggtttgacacaaacaattgcctgggcgaccagaagctcgtcgaacggctgcacatggtcctgcggccatttctgctcaggcggatcaaggcagacgtcgagaaaagtcttccaccaaagaaagaggtcaagatttatgtcggcttgtccaagatgcagagggaatggtacacccgaattcttatgaaagacatcgacatactgaattctgccgggaagatggataaaatgcgactgctgaacatattgatgcagctgaggaagtgctgcaaccatccgtatcttttcgatggcgctgagcctgggcccccatacaccaccgacatgcacttggttaccaacagcggaaagatggtggtgctggacaagcttctccccaagctgaaggagcagggaagcagggtcctcatcttctcccagatgacccgagtactcgacatccttgaagattactgtatgtggcgaaactacgagtactgccgactggatggtcagaccccccacgatgaacgacaagacagtatcaatgcctacaacgaacccaacagcacaaaattcgtcttcatgttgtcaacccgagcgggcggcctgggcattaacttggctacggcagacgttgtcatactgtacgacagcgattggaacccacaggtcgatctgcaggcaatggaccgggcacatcggattggccagaccaaaactgtaagggtgtttcggtttatcacggataacacagttgaagagcggatagtcgaacgagccgagatgaagctgaggcttgactcaattgtcatccagcagggccggttggtagatcagaacttgaacaagattggaaaagatgaaatgctccagatgatacggcatggggccactcatgttttcgctagtaaagaaagcgagattacggatgaagatattgatggaatcctggagcgcggggcaaagaagaccgcagaaatgaacgagaaactgagcaagatgggcgagagctctctgcgcaatttcacaatggacacggagtccagcgtgtacaattttgagggtgaagactaccgcgagaagcagaaaatcgcctttacagagtggattgaacccccaaagcgggagagaaaggcaaattatgctgttgacgcttatttcagggaggctttgagagtcagcgaacccaaggcccctaaggcccccaggcccccaaaacagcctaacgttcaggattttcaattctttcccccaagattgtttgagcttctggaaaaggagatcctgttctacaggaaaacaattggctacaaagttcctcggaacccggaactcccaaatgctgcccaggcccagaaggaagagcagctgaaaatcgatgaagcagaaagcctcaacgacgaggaactggaggagaaggaaaagctgttgacg

SEQ ID NO: 55 - DNA, 1347 bp, synthetic construct
  source 1..1347: mol_type = other DNA
gccaccatgaaggagagagccgttctgctgcagcggcggaaaagggagaatatgagtgacggtgatacttccgctactgagtcaggcgacgaagttcccgtggagctgtacaccgcattccagcacactccaaccagtattacactcaccgcgtcacgcgtaagcaaggttaacgacaagcggaggaagaaatctggagagaaagagcaacatattagtaagtgtaagaaggcttttcgggaggggtcccggaaaagcagtagggtgaaaggctctgcccccgaaatcgacccttcaagcgatggttccaactttgggtgggaaacaaagattaaggcctggatggatagatacgaagaagccaataacaaccagtacagcgagggggtgcagcgcgaggctcagagaattgccctgcgcctgggaaatggcaatgacaagaaggagatgaacaagtctgacctgaacaccaacaatctcctgttcaagcctccagttgaaagccatattcagaaaaacaagaaaatactcaaatctgccaaggacctccctcccgatgccttgattattgaatatcgcggtaagtttatgctgcgcgaacagttcgaggccaacggctatttttttaaacggccataccctttcgttctcttctactcaaaatttcacggcttggagatgtgtgtggacgctaggacattcgggaatgaggcgagatttatcaggagatcatgtacacctaacgcagaggttaggcacgaaatccaggacgggaccatccacctgtacatatatagcatacatagcatccctaagggcactgaaattacaatcgctttcgactttgactacggtaactgcaagtataaggtggattgtgcctgtctcaaagaaaatccagaatgccccgttttgaagaggtcctccgaatcaatggagaatatcaattcaggttatgagaccagacgcaagaaaggcaagaaagacaaggatatctccaaggaaaaggacacgcagaaccagaacattactctggactgcgaaggcactactaacaaaatgaaatctcctgaaacgaagcagcgcaaactgtctcccctgcggttgagtgtcagcaacaatcaggagcccgactttatcgatgacattgaggagaagactccaatttctaacgaagtggagatggagtccgaggagcaaatagccgagcggaaaaggaaaatgacccgcgaggagaggaagatggaggcaatcctccaagcgtttgctcggttggaaaaaagggaaaagcgcagggagcaagcattggagcggatctcaaccgctaagactgaggttaaaactgag

SEQ ID NO: 56 - DNA, 1326 bp, synthetic construct
  source 1..1326: mol_type = other DNA
gccaccatgcaaaagggtaaggggcggacctcccgaattaggaggaggaagctgtgtggaagtagtgaatctcgaggggtgaatgagtcacacaagtccgagtttatagagctgcgcaagtggctgaaggcccgcaagtttcaggattccaatctggctcccgcttgttttccaggtacaggtagagggctgatgtcccagaccagtctgcaggagggccagatgattatctctctgcccgagtcttgcttgctcactaccgataccgtcatccgctcatatcttggcgcctatatcacaaagtggaaaccaccccccagtcctctgctcgctctgtgtaccttcctcgtgagcgaaaaacacgcaggccatcggtccctgtggaaaccctatttggagatcctgcccaaggcatatacgtgtcctgtgtgcctcgaacccgaggtggtgaatctgcttccaaagtctctgaaggccaaggctgaagaacagcgcgctcacgtgcaagagtttttcgcaagctctcgagacttcttttcttccctgcagcccctctttgccgaagcggtcgattctattttctcctattcagccttgctgtgggcttggtgtaccgtaaatactcgcgctgtctatttgcgccctcggcagcgggagtgtctctcagctgaacccgacacctgcgcgctggccccttacttggacttgctcaaccatagcccccacgtgcaagttaaggccgctttcaacgaagaaactcacagctacgagatccgcacaacaagcagatggcgaaagcatgaagaggttttcatctgttatggaccgcacgacaaccagagacttttcctggagtacggatttgtttctgtccacaatccccacgcctgcgtgtatgtgtcccgcgaaatcttggtgaagtatctgccgtctacagacaagcagatggataaaaaaatctccattctcaaagatcatggatacattgaaaatctcaccttcgggtgggacggtccatcatggaggctgcttacagctttgaaactgttgtgtttggaagcagagaaatttacctgctggaaaaaggtgctgttgggagaagtcatcagtgacactaacgagaaaacatctcttgatattgcccagaagatctgctactatttcatagaggaaacaaacgccgtactccagaaggtaagtcacatgaaagacgaaaaggaggcccttatcaatcaacttacactggtggagtccctgtggaccgaggagcttaagatacttagagcttccgccgagactttgcactccttgcagaccgcgttcacc

SEQ ID NO: 57 - DNA, 3147 bp, synthetic construct
  source 1..3147: mol_type = other DNA
gccaccatggctgagctcaaccccaactctgaatggttcgaaaattatagtctgtgtcatcggtgtcataaagctcagggtggccaaaccatccgaagtgttgctgagcaacacacccccgtgtgcagtcggtttagcccacccgaacctggcgacactcctacagacgagcccgatgccctttacgtcgcttgtcagggtcaacctaagggaggacacgtgacttccatgcagcccaaagaacccggtccacttcagtgcgaagccaagcccctggggaaggcgggagtacagttggagccgcaattggaggctccgcttaacgaagagatgccattgttgccaccaccggaagagtccccgttgtcaccacctcctgaagaatctccaacatctcctccaccagaagcctcccggctgtcaccacccccagaagagttgcctgcatccccgcttccagaggctttgcacctcagtcgaccacttgaggagtctccactgagcccaccgcccgaagagtctcctctctcaccgcccccagagtccagtccatttagcccccttgaagaatctccactgagcccaccagaagaatctcccccctcacccgccttggagacacccctgtccccaccacccgaggcgtctcctctcagccctccctttgaagaatccccactctcacccccccctgaggagctgcccacttcccccccgccggaagcctcccgactcagcccgccacccgaagagtctccaatgagccctccccccgaggaatccccaatgtccccacctcctgaggcctctagattgttccccccatttgaggaatccccactgagccccccaccagaagaaagtcccctgtcccccccgccagaggcgtccaggttgagtccaccccccgaggacagccccatgagcccaccccccgaggagtcccctatgtctcccccccctgaagtcagtcggctgagccccctcccggtggtctcacggctgagccctcctcctgaggaatcccctctcagcccaccgcctgaagaaagtcctacttcaccccccccagaggcaagtcgccttagcccacctcctgaggatagcccaacttctccacccccggaggattctccggctagcccacccccagaggactcattgatgtctctgccactcgaagaatcaccactgctcccactgccagaggagcctcagctgtgcccccgctctgagggcccacacctgtcccccagacccgaggaacctcacctgagccccagaccggaggaaccccacctgagcccgcaagctgaggaacctcacctctccccccagccagaagagccctgcctttgcgctgtgcccgaagagccgcatctgtctccccaggcagaagggccacacctcagccctcagcccgaggagctgcacctgtccccacaaaccgaagaacctcacctgtccccagttcccgaagaaccctgcttgagtccgcagcctgaagagagtcacctgagcccccagtctgaggaaccatgcctcagtccgagacctgaggaaagccatctcagtccggagctggagaagccgccactgtcccctcgcccagaaaagccgcccgaagagccgggccaatgtcctgctcctgaggagctgccgctgttccctcctcctggagagcctagcctgagccccctcctgggtgagccagccctttctgaaccaggagagccgcctctgtccccactgccagaggaactgcctctgtcaccaagcggcgagccctcactgtctcctcaactcatgccccccgaccctctgcctcctcctctcagtcccattataaccgccgctgcgcccccagcgcttagtccactcggcgaactcgagtacccgttcggggccaagggcgacagtgatccagagagccccttggcagctccaattctcgaaacgcctatcagtcccccacccgaagctaattgtaccgaccctgaacctgtaccacccatgattctgcctccaagcccaggaagtcccgtcgggccggcctccccaatattgatggaaccactgcccccccagtgttctcctcttctgcaacattcactggtgccacaaaattcaccccccagccagtgctcccccccggcccttcccctcagcgtgcccagccccctgtccccaattggcaaggtggtcggagtctcagacgaggccgaattgcacgagatggaaacggagaaggtctccgagccggagtgtcccgctctcgagccgtccgctacttctccactcccttctcctatgggcgacctgagctgcccggcaccaagccctgcacctgctctggacgatttttctgggctgggagaggacaccgcccccttggatgggattgatgcgcctggctcccagcccgagccagggcagacacccggctcattggccagcgaattgaagggatccccggtcttgcttgatcctgaggagttggctcccgtgacaccgatggaagtgtacccagaatgtaagcagactgccgggcaggggagcccctgtgaagaacaggaagagccccgcgctcctgtggcccccactcctcccacactgattaagtctgacattgtgaacgaaatctccaatttgagccaaggtgacgcttccgcttccttccctgggagcgaaccactcctgggctctcccgatccagaaggtggcggcagcttgagcatggaactcggcgtgtctactgacgtgagtcccgctcgggatgaagggagtcttcggctttgtacagacagcctccccgaaaccgacgatagcttgttgtgtgatgccggcaccgctatttcaggggggaaggctgaaggagaaaagggtcggcgcagatcatcccccgcaaggagtcggatcaagcagggccggagttccagctttcccggccgccgaagaccacgggggggggcacacggaggtcgcggtaggggaagagctcgactcaagagcactgctagctcaatagaaacactggtggtcgccgacatcgattctagccccagcaaggaggaggaggaagaagacgatgacaccatgcagaatactgtcgtcctgttcagcaacactgacaagttcgtacttatg

SEQ ID NO: 58 - DNA, 657 bp, synthetic construct
  source 1..657: mol_type = other DNA
gccaccatgggccggcacccactgatggaattgcccctgatgatcaatcctaccggctgcgctcggtccgagccaaagatcctgacccactataagcggcctcatactctgaacagtacaagtatgagtaaagcctatcaaagcacatttaccggagagacaaatacaccctacagcaagcagttcgtgcatagcaagtcctctcaatatcgccggctgagaaccgagtggaagaacaacgtgtacttggcccgctctagaatccagggtctgggactctacgctgctaaagacctggaaaagcataccatggtgattgaatacatcggcactattatacggaacgaagtcgccaacagaagggagaagatttacgaagaacagaatcggggtatctacatgttcagaataaataatgaacacgtcatagatgcgaccttgacaggaggccccgcccgctatatcaaccactcatgcgcgccgaactgcgtagctgaagtggtgaccttcgataaagaggacaaaatcataattattagctctcgacggatccctaagggcgaggaactgacctacgattaccagttcgattttgaggacgaccagcataaaataccctgccactgtggcgcgtggaactgccggaaatggatgaat

SEQ ID NO: 59 - DNA, 1551 bp, synthetic construct
  source 1..1551: mol_type = other DNA
gccaccatggcagccagagcaggcttccagtcagttgccccaagtgggggcgctggagcttcagggggcgcaggtgccgcagctgccttgggaccaggcggcacgccagggccaccagtccggatgggtccagctcctggccagggcctgtacaggagccctatgccaggtgctgcctacccaagacccggaatgctcccgggcagtagaatgactccacagggcccttccatgggtccaccaggttacggaggtaaccctagtgtgagacccggcctcgcccagagtggcatggatcagagtaggaagcggccagccccacagcagatccagcaggtccagcagcaagcggtccagaatagaaaccataacgcaaaaaagaaaaagatggccgataagatactgccccaacgcatacgggaactcgttcccgaaagtcaagcttacatggaccttctggcttttgagagaaagctggaccaaacaatcatgaggaaacgactggacatccaggaggccctgaaacgccccatcaagcaaaagcggaagctcaggattttcatatcaaacacatttaatcccgccaagagtgacgccgaggacggcgagggcaccgtcgctagttgggaactcagggtagaaggcaggctcctcgaggactctgcactgagcaagtacgatgctactaagcagaagcgcaaattctctagcttttttaagtcactggttatagagcttgataaagacctctatggccccgataatcatctcgttgagtggcataggaccgccaccacccaggagacagacgggttccaggttaaacgaccaggcgacgtgaacgttcgctgtacagtcttgctgatgctggactaccagcccccacaattcaaactggacccaaggctggccaggctcctgggtattcacactcagacaagaccggtgatcatccaggcactgtggcagtacataaaaactcacaagctgcaggatcctcatgagcgagaattcgtgatatgtgataagtacctccagcagattttcgaaagccagcgaatgaaattcagcgaaatcccccaacggctccacgctctgctgatgcctcccgaacctatcattattaatcatgtgatctctgtcgatcccaatgatcagaaaaagaccgcctgctatgatatcgatgtagaggtggatgacactcttaaaacacagatgaattcattcctcctgagtaccgcaagccaacaagagatcgcaacactggacaataagattcatgagactatcgagacaattaaccagctcaagactcagagggaatttatgctctcattcgcaagggacccacagggatttattaacgactggctgcaaagtcagtgcagagatctcaaaacaatgactgatgtagtagggaatcctgaggaggaacgccgcgcagagttctactttcaaccctgggctcaggaagcagtgtgtagatatttttatagcaaggtgcaacagcgcaggcaggagctcgaacaggccctggggatcagaaatact

SEQ ID NO: 60 - DNA, 1305 bp, synthetic construct
  source 1..1305: mol_type = other DNA
gccaccatggcaacctctggcgattgtccaaggagtgagtcccaaggcgaggagcccgccgagtgcagcgaggctggactgctgcaggagggggtgcagcccgaggaattcgtcgcaattgcggactacgcagccactgatgaaacacaactgtcatttttgcgaggagagaagatactgattcttaggcaaacaacagcagattggtggtggggagagagggctggatgctgtggctatatccccgctaaccacgtgggcaaacatgttgacgagtatgaccccgaggatacatggcaggatgaggaatacttcggcagttacgggaccctcaagcttcatcttgagatgttggctgatcagcccaggacaacaaagtatcatagcgtgatattgcaaaataaagagtccctgaccgataaagtgatcctcgacgtgggctgcggtacagggattattagtctgttctgtgcccactacgcacgacctcgggccgtatatgccgttgaggccagtgaaatggctcagcacaccggacagctcgtgcttcagaacggctttgctgacatcatcaccgtttaccagcagaaagtcgaggacgtcgtgctcccggagaaggtggacgtcctggtctcagaatggatggggacttgcttgctcttcgagttcatgatagagtccattttgtacgcccgcgacgcctggctgaaggaggacggagtgatctggcccaccatggccgcccttcacctggtcccttgtagcgccgataaggactataggtccaaggtgttgttctgggacaatgcttacgagtttaatctttccgctcttaagtcccttgccgttaaagagtttttcagcaagcctaagtacaaccacatcctgaaaccagaggactgcctctcagaaccttgcaccattctgcagcttgatatgagaacagtgcagatttctgacctggagaccctccggggagagctcagatttgatattagaaaggctgggaccctccatggatttacagcttggttttccgtacacttccagagccttcaggaggggcagccaccgcaggtattgagtaccggcccattccatccaactacacactggaaacagacattgttcatgatggacgatcctgtgcccgtgcatactggcgatgtggtcacagggagtgtcgtgttgcagaggaacccagtatggagacggcacatgtctgtggccctgagctgggctgttactagtagacaagacccaacgagtcagaaggtgggcgaaaaagtctttccgatctggaga

SEQ ID NO: 61 - DNA, 372 bp, synthetic construct
  source 1..372: mol_type = other DNA
gccaccatgcaactgcagctgggccgcgtgactagagttcaaaaacacagaaagattttgagggcagctcgcgatctggccctggatactctgatcatcgagtacagaggaaaagttatgctgcggcagcaattcgaggtcaacgggcacttcttcaagaagccctatcccttcgtgctgttttattccaagttcaatggcgtcgagatgtgcgtggatgcaaggacattcgggaacgacgccaggttcattcggagaagctgtacaccaaacgccgaggttcgccacatgattgcagatggaatgattcatttgtgcatctacgctgtgtccgcgattactaaggacgccgaggtgaccatcgcttttgat

SEQ ID NO: 62 - DNA, 2130 bp, synthetic construct
  source 1..2130: mol_type = other DNA
gccaccatgagcggactcggggatagtagcagcgacccagcaaatcccgattcacataagcgaaaaggtagcccatgtgacacactggccagttcaacggagaagcggaggcgggaacaggaaaataagtaccttgaggagctggcggagctccttagcgctaatattagcgatatcgacagcctcagcgttaagcctgacaaatgcaaaatcctgaagaagaccgttgaccagattcagcttatgaagaggatggaacaggaaaaatctaccaccgatgacgacgtgcaaaagtccgatatatccagtagtagccagggtgttatcgaaaaagagagcctgggcccattgctgctggaagcacttgatggttttttcttcgtcgtcaattgcgaaggcaggatagtgtttgtgagcgagaatgtcactagttatcttggttataaccaggaagaattgatgaacacttccgtctatagtatactgcatgtgggggatcatgccgagtttgtcaagaacctgcttcctaagtcacttgtgaatggggtcccctggcctcaagaggccacaagaagaaacagccatacatttaactgtaggatgctcattcacccccctgacgagccaggcacagaaaatcaagaagcatgtcagcgctacgaggttatgcagtgctttacagtttcccagccaaagagtatccaggaagatggtgaagattttcagagctgtctgatctgcattgctcggcgactgcctcgcccaccggctattactggcgtagagtcatttatgacaaagcaggacaccacgggcaaaattataagcatcgacacatcctctctgagggcagccggccgaacaggctgggaggatttggtgcggaaatgcatctacgctttcttccagccgcagggtcgagaaccctcctatgcaagacagctcttccaggaagtgatgacaagaggtacagcatcctctcctagttacagattcattctgaacgatgggactatgctttctgcccacactaaatgcaagctgtgctaccctcagtcacccgatatgcagccgttcattatggggatccacatcattgatagagagcacagcggactttcaccgcaggacgatacaaactctggcatgtctatcccccgggttaatccctccgtcaacccctctatttcaccagcccacggggtagcaaggtctagcaccctgcccccttccaactccaatatggtgagcacacggatcaatcgccagcagtcaagtgaccttcacagttcctctcacagtaattcatcaaatagccagggtagttttggctgtagcccgggctcccagattgtggccaacgtggcactgaaccagggtcaagcctcaagccaatctagcaatccttccttgaacctgaacaactcaccaatggaaggcaccggaatctcactcgctcagtttatgtcccctagacggcaggtcacctccgggcttgccacacgacctcggatgcccaacaatagtttccctccgaacatttccaccctgtcaagccctgtcggcatgacctccagtgcatgcaacaacaataataggtcctatagtaacatccctgtaaccagtttgcagggtatgaacgagggtcccaataactcagttggattctccgcttcctcaccagttcttaggcaaatgagctctcaaaacagccccagtcgactgaatatacagccagcaaaggccgagtcaaaagataataaggaaatcgcgagcattctcaatgaaatgattcagtctgataacagctcttctgacggtaagcctctggactcaggtctcctgcacaacaatgacagactgtccgatggggactctaagtattcccagacctctcacaagcttgttcagctccttaccacaaccgccgagcagcagctcaggcatgcggatattgacacctcttgcaaagatgtactgtcttgcaccgggacctctaacagtgccagcgcaaattcatcaggtggctcttgccctagcagtcactcctcactgacggaacgccacaaaatcctgcaccggctgttgcaggaaggaagcccaagcgatataacaaccctgtctgtagag

SEQ ID NO: 63 - DNA, 2208 bp, synthetic construct
  source 1..2208: mol_type = other DNA
gccaccatgcctgacaaaaaggatagcgctagcactagcgtgagtgtgaccggccaggtgcaaggtaactcctccattaagttggaactcgacgcatccaaaaagaaagagtccaaggatcaccaactgctgcgctacttgctcgacaaggatgaaaaggatctgcggtcaacaccaaaccttagtctcgatgatgttaaggtgaaagtggagaaaaaagagcaaatggatccctgcaatactaaccctacccccatgacaaaacctaccccagaggagatcaagctggaggcccaaagccagttcacagcagatctcgatcagttcgatcaactcttgcccacgctcgaaaaagccgcccagcttccaggcctttgcgagacggatcggatggatggcgccgtcaccagtgttacgataaagtcagagattctcccggcctcactccaatcagccacagcccgacccacctctaggcttaaccggctgcccgagctggaactcgaggctattgacaatcagtttggccagccaggcacaggggatcagattccctggacaaacaataccgtaacggcgattaaccagtctaaatcagaagaccaatgcattagttctcagctggatgagctgctgtgcccccccacaactgtcgagggcagaaacgacgaaaaagctttgctggaacagctggtgtcattccttagcggaaaagacgaaactgaactcgccgaactcgatcgggctctgggcatagacaaattggtgcaaggtgggggactggatgtactgtctgagcggttcccgccacagcaggccacaccccccctgatcatggaggagaggcccaatctgtattcccagccgtatagctctcctagccccaccgcaaaccttcctagtcccttccaaggaatggtgcggcagaaaccaagcctgggtactatgccagtgcaggtgaccccaccaaggggagccttctctccaggtatgggtatgcaacctcggcagaccctgaatcggcctccagccgcacccaatcagctcaggctgcaacttcaacagaggctgcaaggacagcagcagctgatccatcagaatcgccaggctatcttgaatcagttcgccgctaccgccccagtcgggataaatatgagatctggcatgcagcagcagataacaccacaaccgcccctgaatgcacagatgctcgcccagaggcagcgcgagctctattcccaacagcatcggcaacgccagctgatacagcaacaaagagccatgctgatgagacagcaaagctttggaaacaacttgcccccttcaagtggtctgccagtccagatggggaatccccgcctgccacagggcgctcctcagcagtttccttacccaccaaattatggcaccaaccccggtaccccgcctgcgtcaacaagccccttctcacagttggccgctaacccagaggcctctctcgctaatagaaactctatggtgtctcgaggcatgaccggtaatataggtggacaatttggcacagggatcaatcctcagatgcagcagaacgtgttccaataccccggggctgggatggtgccccagggagaagccaactttgcaccaagcctctcccccggaagctcaatggtgcctatgcctatcccacctccccaaagctccttgttgcagcaaaccccccctgcctcagggtaccagagcccagatatgaaggcctggcagcagggcgccatcgggaacaataatgtcttctctcaggccgtgcagaaccagcctacccctgcgcagcctggtgtgtataataatatgagtatcactgttagtatggcgggtgggaatacgaatgttcaaaatatgaatccgatgatggctcaaatgcaaatgtcttcattgcagatgcctgggatgaacactgtctgccccgaacagatcaatgatcctgctttgagacatactggcctgtattgtaaccagctgtcatctactgatcttctcaagaccgaagccgatgggactcagcaagttcaacaggtgcaggtgtttgcagacgtgcagtgtaccgtgaatctcgtggggggagatccttaccttaaccagcctggacctctcgggactcagaaacctaccagcgggccacagactccacaagctcagcagaagtcactgctccagcagttgttgacagag

SEQ ID NO: 64 - DNA, 993 bp, synthetic construct
  source 1..993: mol_type = other DNA
gccaccatgactggtaacgccggagaatggtgcttgatggaaagtgaccctggtgtgtttaccgagttgattaaggggttcggctgtaggggagcacaggtagaagagatctggagtcttgaacccgagaacttcgaaaaacttaaacccgtccatggtctgatctttttgttcaagtggcagcccggcgaggagcctgctgggagtgtggtgcaggattcccggctggatactatcttcttcgctaaacaagtcattaataatgcttgtgctacacaggcaatcgtctctgtgctgttgaactgcacccaccaggatgtgcacctgggagaaaccttgagcgagtttaaggagttctctcaatcctttgacgccgcaatgaaaggtctggcactgtctaatagcgacgtaatacggcaggtgcacaattcatttgcgcgacagcagatgtttgagttcgacaccaagaccagtgccaaagaggaggatgcatttcacttcgtctcttacgtccctgtgaatggacgactctatgagttggatggactccgggagggacccatagacttgggcgcctgcaatcaggacgactggatctccgctgtccggcccgtaatcgagaaacgcattcagaagtactctgagggggaaatcagatttaatctgatggctatagtctccgaccggaaaatgatctacgagcagaaaatcgctgaactgcagagacaactcgctgaggaagagcctatggacacagaccagggaaatagcatgctgtctgccatccagtcagaagttgctaagaaccagatgctcattgaggaggaggtacagaaactgaagcggtataaaatagagaacatcagaagaaaacataattacttgcccttcatcatggagttgctgaagaccctggctgaacatcagcagctgatccctcttgttgaaaaggcaaaagagaagcagaatgccaagaaagcccaggagactaaa

SEQ ID NO: 65 - DNA, 2016 bp, synthetic construct
  source 1..2016: mol_type = other DNA
gccaccatggcagaaaaccttttggacggaccacctaacccaaagagagccaagctttcctctcccggcttttcagctaatgactccaccgactttggctcactgtttgacctggaaaatgatcttccagatgaactgatccccaacggcggcgagctgggcctgctgaattctggaaatctggtgcccgatgcggcatctaagcacaagcaactgtcagagctgctgaggggcggctccggctctagtataaatcccggcattgggaatgtgtccgcgtcatccccagtgcagcagggtctgggcgggcaggcgcagggtcagcccaactccgcaaacatggccagtctctctgccatgggcaaatcccccttgagtcagggagactccagcgctccctcactgccaaagcaggctgcaagcacctccggccctacaccagcagctagtcaggctctgaatccccaggcccagaagcaagtgggactggccacgtccagtccggctactagtcagacaggtccaggtatctgcatgaatgccaacttcaaccagactcatcctggactcctgaacagcaacagtgggcacagtctcataaaccaggctagccagggacaggcgcaggtgatgaacggaagcctgggtgcagccggccggggccggggagccggcatgccctacccaaccccagctatgcagggggctagctcaagcgttcttgccgaaaccctgacccaagtcagtccccagatgacgggccacgccggcctcaacactgcacaggcgggtggcatggccaagatggggatcaccggcaacacctctccattcggtcagcctttcagccaggcaggagggcagcccatgggtgcaaccggagttaacccacagctggcttctaagcaatccatggttaactccctccccacatttcctaccgatattaaaaataccagcgtgacaaacgttcctaacatgtcacagatgcaaacttccgttgggatcgtacccacacaagcaatcgcgactggtcctacagcagatccagaaaagagaaagttgatacagcaacagctcgtacttcttttgcatgctcacaagtgccagaggcgagagcaggccaacggagaagtcagggcatgttctctgccgcattgccgcaccatgaagaacgtgcttaaccacatgactcactgtcaggccggcaaggcttgccaggttgcccattgtgccagtagcaggcagataataagtcactggaaaaactgtaccagacacgattgtcccgtctgcctccctctcaagaatgcgtctgacaaacgcaatcagcagaccatcctcgggtctccagccagcggcatacagaacaccattggctccgttggtacaggccaacagaatgcaacaagtctctcaaatccgaatcctatcgacccaagttccatgcagcgagcatacgcggccctgggcctgccatatatgaatcaaccccagacccagctccagccgcaagtgcccggacagcagcctgcccagccgcaaacacatcaacaaatgcggaccctgaatcccttgggcaacaatccgatgaatatccccgcaggcggcattactacagatcaacagccgcccaatctcatcagtgaaagcgcgctgccaaccagtctgggagcaaccaacccactcatgaatgatggaagcaacagcggaaatattgggacgctgagcaccattccaactgctgcaccgccaagtagcactggagtgcggaagggttggcacgagcatgtcacccaggaccttaggtcccatttggttcacaagctggtgcaggccatattcccaaccccagatcctgccgccctcaaagacaggagaatggagaacctcgtagcctatgccaaaaaagtcgaaggggatatgtacgaaagtgcaaattcacgggatgaatattaccacctgctcgcagaaaagatatataagattcagaaggagctggaagaaaagcgaagg

SEQ ID NO: 66 - DNA, 1515 bp, synthetic construct
  source 1..1515: mol_type = other DNA
gccaccatgtgctgcggtaggaagtatgaattctccccacagacactctgttgctatggtaagcaactctgcaccatcccccgcgatgctgcatactatagttaccagaatcggtaccatttttgtgagaaatgttttacagagattcagggcgaaaatgtaaccctgggcgatgatccaagccaacctcagactactatttccaaagatcagttcgaaaaaaagaagaacgatacactggatcccgagccgttcgttgactgtaaggagtgcggccgcaaaatgcatcaaatttgtgtgctgcattacgacatcatctggccaagcggctttgtctgtgataactgcttgaagaaaacaggccgcccgaggaaggagaacaaatttagcgccaaaaggctccaaacaacaagactgggcaaccaccttgaggatcgggtgaacaagttccttcgacggcagaatcaccccgaggcaggagaagtattcgtgcgagtcgtcgcttctagtgataaaacagtggaagttaagcccggtatgaaaagccgattcgtcgactctggtgagatgtccgagagcttcccctacaggacaaaagccctttttgcctttgaagagatcgatggggtggacgtgtgctttttcggcatgcacgttcaggagtacggctccgattgtccccctcctaacactaggagggtgtacatctcttacttggatagcatccacttctttcgcccgcggtgtctgcggaccgccgtgtaccatgaaatcctcatcgggtaccttgagtacgtgaagaaactgggatatgtaactgggcatatatgggcctgccctccttctgagggggatgattatatctttcactgtcatccccctgaccagaagatcccaaaacccaagcggctgcaggagtggtacaagaaaatgctcgataaggcttttgccgaacggatcattcacgattacaaggatattttcaagcaggcaactgaggaccggcttacaagcgctaaggagttgccctacttcgagggtgacttttggccgaatgtattggaggaatctatcaaagagctggagcaggaagaagaagagagaaagaaagaagaaagcactgctgcttcagaaactaccgaaggaagccagggcgattctaaaaacgccaaaaagaaaaacaataaaaaaaccaacaaaaacaagtcatccatatcccgcgcaaacaagaaaaagcccagcatgcccaacgtgagtaacgatctcagtcagaaattgtatgcaactatggagaagcacaaagaagtgttttttgtgattcatctccatgccggacccgtgattaatacactgccgcctatcgtcgacccggaccctcttctgtcctgcgacctcatggatggcagggacgcatttctgacactggcccgcgataaacactgggagtttagctccctccgccgatctaaatggagcacgctgtgcatgttggtcgagctgcatactcaggggcag

SEQ ID NO: 67 - DNA, 2235 bp, synthetic construct
  source 1..2235: mol_type = other DNA
gccaccatggataggttcgtgtatacctgtaacgaatgcaagcatcatgtggaaactcggtggcactgtactgtgtgcgaggactatgatttgtgtataaactgctacaatacaaagagccatgcacataagatggtgaagtggggactggggctggacgacgaaggctccagtcagggcgaaccacaatccaagtctcctcaggagagtcggcgcttgagcatccaaagatgtatccagtccctggttcatgcatgccaatgccgcaatgctaactgtagtcttccctcttgtcagaagatgaagagggtggtgcaacacacgaagggttgcaaaagaaagactaacggaggttgccctgtgtgcaaacagctgatcgcactgtgttgctatcatgcaaagcattgccaagaaaacaagtgtccagtcccattttgtctcaacatcaagcataagctgcggcagcagcaaatacaacataggctgcagcaagcccaactcatgcgccgaagaatggccacgatgaacaccagaaacgtgcctcaacagtcactgccgtctcctacttccgcccctcctggaacaccaacgcaacaacctagcacccctcagactccccagccacctgcccaacctcaaccatcccctgtctcaatgtcccccgcaggctttccgtctgtggctcgcacacagcccccaacgaccgtctccaccggcaagccaacgagccaggtgccagcgcctccaccgcctgcacagcccccaccggccgctgtggaggcggcgcggcagatcgagcgcgaagcacagcagcagcaacacctgtaccgcgtaaatatcaataacagtatgccaccaggcagaacaggcatggggacaccagggagtcagatggctccggttagtctgaacgtaccccgcccgaaccaggtctctggtcctgttatgccatccatgcctccaggccaatggcaacaggcgcctttgccccagcaacagccgatgcccggcctgccacggccagtgatcagcatgcaagcccaagcggctgtggccggccccagaatgcccagcgtccaaccacccaggagcatatctccgtctgcccttcaggacctgctcagaaccctgaaatccccgagctctccccaacagcagcagcaggtgctcaatatactgaaatccaatccgcaactgatggcagcattcattaaacagagaaccgctaagtacgttgcaaatcagccaggtatgcagccacagccaggcttgcagagtcagcctgggatgcagcctcaacccggtatgcatcagcagccgagcttgcagaatctcaatgcaatgcaggctggcgtccctcgacctggcgttcctccacagcagcaagccatgggtggactgaacccgcagggacaggcactgaacattatgaatcccggccataatcccaacatggcgagtatgaacccccagtatcgcgagatgttgagaaggcagttgttgcagcaacaacagcaacaacagcaacagcagcagcagcaacaacagcagcagcaaggaagtgctgggatggctggcggtatggccggacacgggcagtttcagcaaccccaaggtcccgggggatatccaccggcaatgcagcaacagcaaaggatgcaacaacatctgccacttcaaggctcctctatggggcaaatggccgcccagatggggcagctgggacagatggggcagcccggcttgggggcagatagtactccaaacatccagcaggcactgcagcagaggatcctgcagcaacagcagatgaaacagcagatcggaagcccaggccaacccaatccaatgagcccccagcaacacatgctcagtggacagccgcaggcttcccatctccctggtcagcaaattgcaacttctttgagcaaccaggttcggtcccccgcacccgttcagtctcccaggccacagtctcagcccccacactccagcccttcaccaaggatccagcctcagccaagtccacatcatgtttccccgcagaccggctcacctcacccaggtcttgccgtgaccatggcctcatcaatagatcagggacacctcggcaacccagaacaatcagccatgctgccacagctcaatacgccgagtcgctccgctctgtcctctgaactgagcttggtgggcgatacgactggcgacacactggaaaaatttgtggagggcctg

SEQ ID NO: 68 - DNA, 1281 bp, synthetic construct
  source 1..1281: mol_type = other DNA
gccaccatggctgacaaggaggcggctttcgatgatgcggtagaggagcgcgtcattaatgaggagtataagatatggaaaaagaacactcccttcctgtatgatcttgttatgacccacgcactggaatggccatccctgactgcgcagtggctgcccgatgtgacccgcccggagggtaaggacttttcaattcacaggttggtactcggtactcatacaagcgacgagcagaaccacttggtaattgcaagtgtacagctccccaacgatgatgcacagtttgatgcctcacattatgactctgagaagggagagtttgggggctttggcagtgtatctggcaagattgagatcgagatcaagattaaccacgagggcgaggtaaaccgggcccggtacatgccacagaacccttgtattattgctacaaagacaccctcatccgacgtgctcgtgttcgattacacgaaacatccaagcaagcctgatccatccggtgagtgcaatcctgatctccgccttagggggcatcagaaggagggctatggcctcagctggaacccaaatctttctggtcacctcttgtcagctagcgatgaccatactatctgcttgtgggacatctccgccgtgccaaaggagggcaaagtcgttgatgcgaaaactatcttcacgggccacaccgccgtcgtcgaggatgttagttggcatctgctgcacgagagcctctttggatcagtagccgacgaccagaaacttatgatttgggacacccgctccaacaacacgtctaagccaagtcactctgtcgacgctcacacagccgaagtgaattgtctctcttttaatccatatagtgagtttatcctggccacggggtcagccgacaagacagtggccctgtgggatttgcgcaatctcaagctgaaactgcattctttcgagtcccacaaagatgagatattccaggtccagtggagcccgcacaatgagacaattttggccagttcaggaactgatcggcgcttgaacgtttgggatttgtctaaaattggagaggaacagtcccccgaggatgcggaagacggaccacccgaactgctttttatccacggcggtcatactgcgaaaatctctgatttctcctggaaccccaatgagccgtgggtgatttgcagcgtgagcgaagacaacatcatgcaagtttggcagatggctgagaacatctacaacgatgaggatcccgaaggaagcgtggaccccgagggacagggcagc

SEQ ID NO: 69 - DNA, 924 bp, synthetic construct
  source 1..924: mol_type = other DNA
gccaccatgaaggggaaggctatcactcccaaagataacaataagaccctcaagccggcaatcgccgaatacattgtgaagaaagctaaacagcgaatagcactccaaagatggcaggacgaacttaatcgaaggaagaaccacaagggaatgattttcgtcgagaataccgttgatctggaaggccccccctcagacttttactacattaatgaatacaaacccgcgcccggtattagcctggtgaatgaagccacatttggatgctcatgtactgactgcttcttccagaaatgttgtcctgctgaggccggagtgctcctcgcatacaacaagaaccagcagattaagataccacccggcacgcctatttacgagtgcaattctcgctgtcagtgtggccccgactgtcctaatcgcatcgttcaaaagggaacacaatactccctttgcatcttcagaacctcaaacgggagaggctggggcgtcaaaacattggtgaagatcaaaagaatgagttttgtgatggagtacgtcggcgaggtcatcacctccgaagaagccgagagaagaggccaattctacgataacaagggaataacatacctctttgacctggactacgagagcgacgaattcacagttgacgccgcgcgatatggcaatgtctcacacttcgtcaatcatagttgcgatcctaacctgcaggtgtttaacgtctttattgacaacctcgatacaaggttgccacggattgctctcttcagcacaagaactattaacgccggagaagagcttacatttgactaccagatgaagggaagtggtgatatatcttctgactccattgaccatagcccggcaaaaaagagagtgcggaccgtgtgcaagtgcggcgctgtcacttgtagaggctacctcaat

SEQ ID NO: 70 - DNA, 1188 bp, synthetic construct
  source 1..1188: mol_type = other DNA
gccaccatgggcatgaagcattctagccggtgtttgctgctccgacgcaagatggctgagaacgcagccgaaagcaccgaggtaaattctcctccctcccaacccccccagccggttgtgccggcgaaacccgtccaatgcgtgcatcacgtgtctacccaaccttcttgtccgggcagggggaagatgtccaagttgcttaatcccgaggagatgacctccagggattactatttcgattcctacgcgcactttgggatacacgaggaaatgctgaaggatgaagtcaggaccctgacctatcgcaactctatgtatcataacaaacacgtgttcaaagataaggtggtgttggacgtcgggagcggtactgggatactgtcaatgttcgcggccaaggcgggtgcaaaaaaagtgtttggtatcgagtgctcttccatttccgattatagcgaaaagatcatcaaagctaaccacttggacaacatcataaccatctttaaaggtaaggtcgaggaagtcgaacttcctgtggagaaagttgatattatcatctctgagtggatgggctattgccttttctatgaatcaatgctcaacaccgtaatctttgctagggacaaatggttgaaacctggtggcctgatgttcccagaccgagcagctctctacgtggtcgcgattgaggaccgccaatataaggactttaaaattcactggtgggaaaacgtatacgggttcgacatgacctgtattagggacgtggctatgaaggaaccattggtcgacatcgttgaccctaaacaggtcgtgactaacgcatgccttattaaagaagtggacatttacacagttaaaaccgaggaattgagttttacttccgccttctgcctccagatccagcgcaacgattatgtgcacgcactcgtgacctacttcaatatcgaattcactaagtgccataagaaaatgggcttttcaactgcccccgacgctccttatacccactggaaacaaaccgtgttctacttggaagattacctgactgtcaggagaggtgaggagatatacggcactataagcatgaaacccaacgccaagaacgtgagagatctggactttaccgttgatctggactttaagggacaactttgcgaaacctctgtgtccaacgactacaaaatgagg

SEQ ID NO: 71 - DNA, 2472 bp, synthetic construct
  source 1..2472: mol_type = other DNA
gccaccatgaacacagctgatcaggcacgggtcgggcccgctgacgacggccctgcgcctagcggcgaggaagaaggagaggggggaggggaggctggtggaaaggaaccggcagctgatgccgctccaggccctagcgcagcgtttcggctgatggttacgcgccgcgagccagctgttaaactgcagtacgctgtgagcggcctggagcctttggcctggagcgaggatcatcgagtgtccgttagcacagccaggagtatcgctgtgctcgagctcatctgcgacgtccataacccaggacaagatctggtgatccatagaacctcagtgccagctcctcttaatagctgtttgttgaaggtcgggagtaaaactgaggtggcagagtgcaaggagaaatttgccgcctctaaggatccaaccgtgtctcagacgttcatgcttgacagagtctttaatcctgaaggcaaagcacttccccccatgcgggggtttaaatatacttcatggagtcccatgggttgcgacgccaatgggagatgcctgctggctgcactgactatggataacagactgactatccaggcaaatctcaatagactccagtgggtgcagctggtggacctgacagagatatacggtgagcgcctttatgaaaccagttatagactttcaaaaaacgaagcccccgaggggaatctgggggacttcgcagagtttcagagaagacattcaatgcagacccccgtgcgaatggagtggagcggaatctgcacaacccagcaggtgaaacataataatgagtgtcgggatgtagggtccgttttgctggcagtgctcttcgaaaacgggaatattgccgtatggcagtttcagctcccctttgtgggaaaagaatccatttcttcatgtaatactatcgaatctggcattacctctccgagcgtgttgttctggtgggaatatgagcacaataatcggaagatgagtggactcattgtgggttctgcttttggccccattaaaatcttgccagttaatctgaaagccgtgaagggatactttaccctgaggcagcccgtgatactgtggaaggagatggaccagcttcctgtccatagcatcaaatgtgtgcctctgtaccacccgtatcagaagtgcagctgctccctggtggttgcagcgcgaggtagctatgtcttttggtgtctgctcctgatttcaaaagcggggctcaatgtccacaactcccacgtgactggactgcactccctcccaattgttagtatgaccgccgacaagcagaacggaacagtatatacttgtagctctgacggcaaggtgcgacaactgatccctatttttaccgacgtagctctgaagttcgagcatcaactgattaagctctctgacgtgtttggcagtgttcggacccatggaatagccgtatcaccctgcggcgcatatctcgcaattattaccacagaaggtatgattaatggactccaccctgttaataagaactaccaagtgcagttcgttacactgaaaacgttcgaggaagccgctgcacaactcctcgagagttcagtccagaatcttttcaaacaagtagatctgatcgacctggtgaggtggaaaatcctcaaggacaagcatatcccacaatttctccaggaagcccttgaaaagaagatcgagagctctggagtgacctacttctggagattcaagttgtttctgctgcgcatactctatcagagcatgcaaaagactccctctgaggcgctgtggaagcccactcacgaggactccaaaatcctcttggtggatagtccaggaatggggaatgcagatgacgaacagcaggaagaaggaacctcctccaagcaggttgttaagcagggcctgcaggaacggagcaaagaaggcgacgtggaggagcccaccgatgacagccttccgaccaccggcgatgccgggggacgcgagcctatggaggaaaagctcctggagatccagggcaagatcgaagctgttgaaatgcatctgactagagagcacatgaagcgcgtcctgggcgaagtatatctccatacatggattaccgagaatacctccatcccaaccagaggcctgtgcaattttctgatgagtgatgaagagtatgatgataggactgccagagtcctcattggacacatcagtaaaaagatgaataagcagacgtttcctgagcactgttctctgtgcaaggagatcctcccctttactgaccgcaagcaggccgtctgtagtaatggacatatctggttgcgctgttttctgacttaccagagttgtcagtcactgatttacagacgatgcctcttgcacgacagcatcgcaaggcatccagctccggaggacccagattggattaagcgcctcctccagagcccatgtcccttttgcgattcccctgtgttc

SEQ ID NO: 72 - DNA, 843 bp, synthetic construct
  source 1..843: mol_type = other DNA
gccaccatggcaagtgagctgggggcaagggatgatgggggctgtacggagctggcaaaaccattgtatctccagtatcttgagcgcgccctccgactggatcattttctccgccagacatccgccatctttaatcggaacattagttccgacgatagtgaggacggcctggatgactccaatccactgcttcctcagtctggggatcctctcattcaggttaaagaggaaccacccaactctcttcttggagagacaagcggggcaggcagttccggcatgctcaacacctatagtctgaatggcgtgttgcaatctgagagcaagtgcgataagggcaacctgtacaacttcagtaagttgaaaaagtcaaggaagtggcttaaatcaatcctcctctcagatgagtccagcgaggccgattctcagagcgaagacgatgatgaggaggaactgaacctcagcagagaggagctgcataatatgctgagactccacaagtataagaagctccaccaaaacaagtattcaaaggataaagagctgcagcagtaccagtactattccgccggtctgctgtcaacatatgaccctttttacgaacagcagagacacctgctggggcccaagaagaagaagttcaaggaggagaaaaagcttaaagctaagctgaaaaaagtgaagaaaaagaggagaagggatgaggaactgagttctgaagagagccctcgcaggcaccatcaccaaacaaaagtgtttgccaagttttctcacgatgccccgcccccaggcactaaaaagaagcacctcagcatcgaacagttgaacgcgaggcgccgaaaa

SEQ ID NO: 73 - DNA, 3117 bp, synthetic construct
  source 1..3117: mol_type = other DNA
gccaccatgtaccagttgaagggaatgaattggctggccaatctctacgaacaggggatcaatggaattctcgctgatgagatgggactgggaaagacggtgcagagtatcgcccttctggcgcaccttgctgagcgggagaacatttgggggccatttctcattatttcccccgcaagtacactgaataattggcaccaggaattcacccgcttcgtccctaaatttaaggtcctcccttactggggcaacccacatgaccgcaaggtgattcgccgattctggagccaaaaaacactgtacacgcaggatgccccattccacgtcgtgatcacttcctaccagttggtggtgcaggacgttaaatattttcaaagggtaaagtggcagtatatggtcctggatgaggcccaggccctgaagagctcctcatccgtccgctggaagattcttctgcaattccagtgtcggaacaggcttctgctgaccggaacccccatccagaacacaatggctgaattgtgggccctcctccactttataatgccaacgctgtttgatagtcatgaagagttcaatgagtggttcagcaaggatatcgagtcacacgccgagaacaagtccgcaattgatgagaaccagctctccaggctgcatatgatcttgaagccttttatgctcagaagaattaaaaaggacgtcgagaatgagctgagcgacaagatcgagatcctgatgtattgtcaactgacctccagacaaaaactgctgtaccaggctcttaaaaacaagatttccattgaggatctgctccagtcctcaatgggtagcactcagcaggctcagaatacaacctccagtcttatgaacctggttatgcaatttagaaaggtatgtaatcaccctgagctctttgagaggcaggagacatggagtccgttccacatttctctgaaaccataccatattagcaagttcatttacaggcacgggcagatccgcgtgtttaaccactcacgggaccgctggctcagagtccttagcccattcgccccggattatatacagagatcactgttccacaggaaaggcataaatgaggaatcttgtttttccttcctcaggttcattgatatctcacccgcagaaatggccaatctgatgctgcagggactgttggctcgatggctggccctcttcctgagccttaaagcctcctacagactgcaccaactgaggtcatggggcgcgcctgagggggagtctcatcaaaggtatcttaggaacaaagactttctcctgggagtgaacttccccctgagcttccctaatttgtgtagctgtcccctgcttaaatctttggtcttttcctctcactgcaaagcagtgagtgggtatagcgaccaggtggtccaccagagacgctctgccacatccagtttgaggagatgcttgctgacggaattgccgtcattcctctgcgtcgcatcacctagggtcactgctgtgccactggattcttactgtaacgaccggtcagctgagtacgagcgcagggttctgaaggagggaggatctctcgcagctaaacaatgtttgctgaacggcgcaccagagctggcggcggactggctcaatagaagatctcaattcttcccagaacccgccggaggcctgtggagcatccgcccccagaacggttggtcctttatccgcattcctggaaaagagtcactcatcaccgactccggaaaactctacgccctggacgttctgctgacgcgccttaaatctcagggccatagggtgctgatttattctcagatgactcgaatgattgatctgctggaggagtacatggtgtaccggaaacacacatatatgcgcctggacggatcctctaagatttcagaacgacgggatatggtggccgactttcagaatcgcaacgacatctttgtctttctgctttcaaccagagcaggtggattgggtattaaccttaccgccgctgacaccgttatcttttacgacagtgactggaatcccaccgtcgaccagcaggcaatggatagggcgcacagactcggccagacaaaacaggtgactgtttatcgcctcatctgcaagggtaccatcgaggagaggatcttgcagcgggcgaaagagaaatctgagatccaacggatggtgatttctggagggaactttaaacctgacacacttaagccgaaggaggtggtgagcctgctgctggacgatgaggagttggagaaaaagctgaggctcagacaggaagaaaaacggcaacaggaagagaccaatcgggtcaaagagaggaagcggaagagggagaaatacgccgaaaagaagaaaaaagaggacgaacttgatggaaagagaaggaaggaaggcgtgaaccttgttatacccttcgtgccctctgctgataacagtaacctcagcgctgatggggacgactcttttattagcgttgattccgcgatgccctccccctttagcgaaatctccatttcatcagaactgcacaccgggagcatcccactggatgagagcagctcagacatgcttgttattgttgacgatcctgcttcatcagcaccccagagcagagctactaattcacccgcaagcatcacaggctcagtgagcgataccgttaatgggatctctattcaagaaatgcccgccgcgggacggggacactctgcacgatccagagggagacccaaaggctctggcagtactgccaaaggggcgggcaaagggcgatcccggaaatccactgctggatccgcagccgccatggccggggctaaggctggggccgcagcggcctccgcagcagcttatgccgcatacggttacaacgtcagcaagggcatcagcgcaagctcacctttgcaaacttctttggtgagacctgcaggtctggctgatttcggacccagctctgctagcagcccgctctcttcccctttgtctaaaggcaataacgtgcccgggaacccaaaaaatctgcacatgaccagctcactcgccccagattcactcgttcggaaacagggtaagggtacaaatccttctggaggccgg

SEQ ID NO: 74 - DNA, 1263 bp, synthetic construct
  source 1..1263: mol_type = other DNA
gccaccatggctggctttggcgcaatggaaaaattcctggttgagtacaagagtgcagtggaaaagaagctggccgagtacaagtgtaatactaacaccgcaatagaactcaagctcgtacgattccctgaggacttggagaacgatataagaacattcttccctgagtatactcatcagctgttcggagacgacgagaccgctttcggttataagggtttgaagattttgctttactacatagccgggtctctgagtaccatgttccgcgttgagtatgctagcaaggtggacgagaattttgactgcgtggaggcagatgatgtagaggggaagataagacaaattatcccaccaggcttctgcacaaataccaacgatttcctctctctgctggagaaggaggtcgactttaagccctttggtactcttctccacacttattctgtgttgagcccaaccgggggggaaaattttacttttcaaatttacaaggccgacatgacctgcaggggcttccgcgaataccacgaacgactgcaaacctttctgatgtggttcatcgagaccgcgtccttcattgacgtagatgacgaaagatggcattacttcctggtatttgagaagtacaacaaggacggggcaacccttttcgcaaccgtcgggtacatgacggtgtacaactactatgtgtaccccgacaaaactaggccaagggtgtcccaaatgctgatactcacccctttccagggacaaggccacggcgcacagcttttggaaacagtgcaccgctattatactgagttccccaccgtgttggatattactgcagaagacccttcaaaaagttacgtcaagcttcgagatttcgtgctggtaaagttgtgtcaagatctcccatgtttcagccgggagaagttgatgcaggggtttaacgaggatatggccattgaagcccagcagaaatttaaaattaataaacagcacgcccgccgcgtatatgagatcttgaggctgctggtgaccgatatgtccgacgcagaacagtacaggagctatcgactggatattaagagaagacttatcagtccctacaagaaaaagcagagagatctggccaagatgagaaagtgtttgaggcccgaagaattgaccaaccaaatgaatcagatcgagatcagtatgcagcatgagcagctggaggagtccttccaggaattggtggaggactatcgcagggtgatcgaaagactggcccaggag

SEQ ID NO: 75 - DNA, 2661 bp, synthetic construct
  source 1..2661: mol_type = other DNA
gccaccatgaagtggcttggagagagtaaaaacatggtggtaaatggaaggaggaatggcgggaaattgtctaacgaccatcagcagaatcagagcaagctgcagcatactgggaaagacacactgaaagccggtaaaaatgcagtggagcgcagatcaaatcggtgtaacggcaattcaggcttcgagggtcagagcaggtatgtgccaagcagtggcatgagtgctaaggagctttgtgagaacgatgatcttgctaccagtcttgtactcgatccctacctcggatttcagacccataaaatgaataccagcgccttccccagtcggagttcccggcatttcagcaagagcgactcattctctcacaacaatcccgttaggtttaggcctattaaaggcagacaagaggagctcaaggaagttatcgaacggtttaagaaggatgagcacctggaaaaggcctttaaatgtctcactagcggggagtgggctcgccactactttcttaacaaaaataaaatgcaggagaagctgtttaaggagcatgtcttcatctacttgcgaatgttcgcaaccgattcaggctttgagatcctcccctgtaatcggtatagtagcgagcaaaatggcgcgaagatcgtggccacgaaagagtggaaacgcaacgataagattgaattgctcgttggatgtattgcggagctgagtgaaatcgaagagaatatgcttctcaggcatggtgagaatgactttagcgtgatgtattctacaaggaagaactgtgcccaactgtggctggggccagctgcattcatcaaccacgactgcagaccgaattgtaagtttgtgtccactgggagagataccgcctgtgtgaaggccctgagagacattgagcccggcgaggagattagctgttactacggcgatggattttttggagagaacaatgagttctgtgagtgctatacctgcgaaaggcgcggtaccggagcattcaaatcaagggtcggacttccagcaccggctccagtcatcaactcaaaatatggccttcgcgaaaccgataagcggttgaacagactgaagaaacttggcgatagttccaaaaattccgacagtcaatccgtcagcagcaatactgatgcggacactacgcaggagaaaaataatgcaacttcaaaccggaagtccagtgtgggcgtaaaaaagaattctaagtcaagaaccctgacccgccagtctatgagtcggattcccgcatcttccaactcaacctccagcaaactgacacacattaataattcaagagttcctaagaagctcaaaaagcccgccaaaccattgctgtctaaaatcaagcttcgcaatcattgtaaaaggctggaacagaagaacgcatccaggaaattggagatgggaaatttggtgctgaaagagcctaaggttgtgctctacaagaatctgcccattaaaaaggataaggaaccagaagggcccgctcaggctgctgtggcatccgggtgcctgacacgccatgccgcacgagagcacagacagaatccggtgaggggcgctcactctcagggggagagcagcccctgcacatacattactcgccgctctgtgcgcacgagaacaaacttgaaggaggcttctgatatcaaactcgaacctaacacactcaacggctacaagtcttcagtgactgagccatgcccagactcaggggagcagttgcagccagctcctgtgctgcaagaggaagagcttgctcatgagaccgcccaaaagggggaggccaagtgccacaagtccgataccgggatgtctaagaagaagtcaagacagggcaaacttgttaagcaattcgctaagatcgaagagtccactcccgtccatgatagtcctgggaaggatgacgccgtccctgaccttatgggacctcactctgaccagggagagcattccggaacagtgggggtgccagtctcctacaccgactgtgccccctctccggtgggctgttctgtcgtgaccagcgacagcttcaagaccaaagactcattcagaactgccaaatccaagaaaaagagacgaatcacccgatacgatgcacagctgatcctcgagaataattccggtatcccaaagctgaccctgagaagacgccatgatagcagttctaagaccaatgatcaggagaacgatggcatgaacagcagcaagataagcattaagctcagcaaagatcacgacaatgataacaatctctacgtcgccaagcttaacaacggcttcaacagtggaagcggctcctctagtaccaaactgaagatccagttgaaacgggatgaagagaaccgaggcagttacacagaggggctgcatgaaaacggtgtgtgctgtagcgatccactgtccctcttggaaagtcggatggaggtggacgactacagtcagtacgaagaggaatccacggacgactccagctctagcgagggagacgaggaagaagacgattatgatgatgacttcgaagatgattttattccccttcctccagccaagcgcttgcgcctgattgtcggcaaggacagcatcgacatcgacattagctcccgacggagggaagaccaatccctgcggctgaatgca

SEQ ID NO: 76 - DNA, 1260 bp, synthetic construct
  source 1..1260: mol_type = other DNA
gccaccatggccgcttctatgtgcgacgtctttagtttttgcgtaggagtggccggaagagcaagggtatcagtagaagtgaggtttgtgagtagtgcaaagggaaaaggcttgttcgcaacccagctgatcagaaaaggcgagactattttcgtcgagcgcccactcgtggcagctcagtttctgtggaacgcactgtacaggtatcgagcatgtgaccactgccttagagcgctggagaaagccgaggaaaatgcacagaggctcacgggaaagccgggccaagtcctgcctcaccccgaactctgtacagtgagaaaggatttgcatcagaactgcccacattgccaggtaatgtattgctcagccgagtgtcgcctggcagctactgaacagtaccatcaggttctttgtcccggcccaagccaggatgaccccctgcatcccctcaacaagctgcaggaggcgtggcggagcatccactacccacccgagacagcctctatcatgctgatggcacgcatggtggcgactgtgaagcaggccaaggataaagatagatggatccgactttttagtcagttttgcaacaaaactgcaaacgaggaggaggagatcgtacacaaactcctcggggacaaattcaaaggccagctggaacttcttagacgcctctttaccgaagctctctacgaggaagccgtgagccagtggtttacacccgacggctttagatccctgttcgctctcgtgggaacaaatggccagggaatcggcactagttctctctcacagtgggtccacgcctgtgacactctcgagctcaaaccacaggaccgggagcagttggacgcatttatcgaccaactctacaaggatattgaagctgcaaccggagaattcctgaattgcgaggggagcggcctgttcgttttgcagtcctgttgcaaccactcttgcgtgcccaacgcagagaccagtttccctgagaataactttctgctccacgtgacagctcttgaggatattaagccaggagaagaaatctgtattagttacctggattgctgccagagggagagatccaggcattcaagacataagattttgcgagagaattacttgtttgtgtgcagctgtcccaagtgcctggctgaggccgatgagcctaacgtgaccagtgaggaagaggaggaagaggaggaggaagaggagggcgagccagaggacgcggagctgggcgacgaaatgactgatgtt

SEQ ID NO: 77 - DNA, 1470 bp, synthetic construct
  source 1..1470: mol_type = other DNA
gccaccatggcttactcccaaggcggcgggaagaagaaggtgtgctactactatgatggagacatcggcaactactactatggccagggtcatcctatgaagcctcaccgaattaggatgactcacaacctcttgctcaattacggcctctacaggaaaatggagatatatcggcctcataaggctactgccgaagagatgactaagtaccacagtgacgagtacatcaagttcctccggtccattagacccgataacatgagtgagtacagcaagcagatgcagaggtttaatgtgggagaagactgcccagtgttcgatggtctcttcgagttctgccagttgtccaccggtggaagcgtggctggagcggtcaagttgaaccgacagcagactgacatggctgtgaattgggccggtggacttcatcatgccaaaaaaagcgaagcctccgggttctgctacgttaatgacatcgtgctggcaatccttgagctgcttaaataccaccagagagttctgtatatcgacatagatatccaccatggggatggcgtcgaggaggccttttacactacagaccgcgtgatgacagtgagctttcataagtacggcgaatactttcctggtaccggtgacctgagagatatcggagctgggaaaggaaaatattatgccgttaacttccctatgagagatggaattgatgatgagtcttatgggcaaatattcaagcctattatcagcaaggtgatggagatgtaccaacccagcgcagtcgtcctgcaatgcggcgcggactctctgtctggagatcgcttgggctgcttcaacctcaccgtcaagggacacgccaagtgcgtggaggtggtgaaaacatttaatctccctcttctcatgctcggtggcggaggttatacgatacggaatgtcgcaaggtgctggacatacgaaaccgctgtggccctggattgtgagatcccgaacgagctcccttacaatgactacttcgagtattttggacctgactttaaactccacatatcaccttccaatatgaccaaccagaatacgcccgaatacatggaaaaaatcaagcaaagactgtttgagaacctgaggatgctgcctcatgctcccggagtccaaatgcaggctatcccagaggatgctgtccatgaggactcaggggacgaagatggcgaggatcctgataagaggattagcattagagcctccgataaacggatcgcgtgcgatgaggaattcagcgacagcgaggacgagggggaagggggcaggcgcaacgtggcagaccataagaagggggccaaaaaagccagaatcgaagaggacaaaaaagagaccgaggacaagaagaccgacgtgaaagaggaagataagtccaaagataattctggggaaaagacagataccaagggcacaaagtcagaacagctcagcaatcct

SEQ ID NO: 78 - DNA, 1392 bp, synthetic construct
  source 1..1392: mol_type = other DNA
gccaccatggataaggactcccagggcttgttggattcatcacttatggccagcggtacagcaagccggagtgaggatgaggagagcttggcgggccagaaaagagcttctagccaggccctgggcaccatcccgaagaggcgctcatcatctaggttcatcaagcggaagaaattcgatgacgaactggtggaatcctcattggccaaatcctccactcgagccaaaggtgctagtggagtcgaacctggccgatgctcaggcagcgaaccatcatctagtgaaaagaaaaaggtaagcaaagctccatctaccccggtacctcctagcccagcgccggctccaggactgaccaagcgcgtcaagaaaagcaagcagccactccaagtgacaaaggacctgggccggtggaaacccgccgatgacctgttgcttataaatgccgtacttcagacaaacgacctgactagcgtccacctgggcgtcaagttttcctgccgcttcaccctccgcgaagtacaggagagatggtacgctctgctctatgaccccgttatctctaaactggcttgtcaggcgatgaggcagctgcaccctgaggccatagcagctatacagtccaaggcattgttctccaaggcggaggagcagctcctgtccaaggtagggtcaacatctcagcctactttggaaacttttcaggacctcctgcatcgccatcccgacgctttctatcttgcgaggacggctaaagcgctgcaggcacattggcaactgatgaaacagtactatttgctggaggaccagacagtacagcccttgccaaagggtgatcaggtgcttaatttcagcgacgcggaggatctgatcgatgattcaaaactgaaggatatgagagacgaggtgcttgagcacgagctgatggtggccgaccgaagacagaagcgcgagatccggcagcttgagcaagagttgcacaagtggcaagtgctcgtggactcaatcactggcatgtcaagtcctgatttcgacaaccagaccctggccgtcctcagagggcgcatggtgcgatacctgatgagatccagagaaatcaccctgggcagagccaccaaggataaccagatcgatgtagaccttagcctcgagggcccagcatggaagataagtcggaagcaaggagtcatcaagctcaaaaacaatggcgacttctttatagcaaacgaaggacgacggcctatatatatagatggccgcccggtcctctgtgggagtaaatggcggctctccaataacagtgtcgtggaaattgccagtctgcgctttgtgttccttatcaatcaagatttgattgctttgattagggcggaagccgccaaaattacaccccaa

SEQ ID NO: 79 - DNA, 1176 bp, synthetic construct
  source 1..1176: mol_type = other DNA
gccaccatgggtgaaaaactggagctcagattgaaaagtccagtgggtgccgagcctgctgtgtacccttggccactccctgtgtatgacaaacaccacgatgccgcgcacgagataatcgagactattcgatgggtgtgcgaggaaattcctgacctcaagctggctatggaaaactatgttttgatcgattacgacacaaagtcttttgaaagtatgcagagactctgcgataagtataacagggccatcgatagcatccatcagctgtggaaaggaaccactcagcctatgaagctgaacactaggcctagcactggactgctgagacatatcttgcagcaggtgtacaaccactctgttacagatcctgaaaagctcaataattatgaacccttctctcccgaggtgtatggggaaacttctttcgacctggtggcccagatgatcgatgagatcaaaatgaccgatgatgacctgttcgtagacttgggaagcggggtgggacaggtggttctgcaggtggcagctgctaccaactgtaagcaccactatggcgtggagaaggctgatattcccgctaagtatgcggagacaatggacagagaatttaggaaatggatgaagtggtatggaaaaaaacacgcagaatacacactggaacgcggcgatttcctgtcagaggagtggcgagaaaggattgcaaatacctccgtgattttcgttaacaactttgccttcggccctgaggtcgaccaccagcttaaggagaggttcgcgaatatgaaagaaggggggcggatcgtgagcagtaagccatttgcaccactgaacttccggataaacagcagaaacctgtctgacatcggcacaattatgcgggtggtcgagctgagtccactgaaaggtagtgtgagctggaccgggaaaccggtctcttactacctccacacaattgaccggaccattctcgaaaattactttagctctttgaagaacccgaagctccgcgaagagcaggaggccgctcgccgaagacagcagagggagtccaaatccaatgctgctacacccactaagggtcccgagggtaaagtggctggcccagccgatgcaccgatggatagtggtgccgaggaagaaaaggcaggtgccgccaccgtaaagaaaccatcc

SEQ ID NO: 80 - DNA, 1167 bp, synthetic construct
  source 1..1167: mol_type = other DNA
gccaccatgagccccgagaaatctcaggaagagtctcccgaggaagacacagaacgcaccgagcgaaagccaatggtgaaggatgcatttaaagacatttcaatctacttcactaaagaggaatgggccgagatgggcgactgggaaaaaacaagataccgcaacgtgaagcggaattacaatgcgctcatcacaatcggcctgagggctactagaccggccttcatgtgccaccggcggcaggccataaagctgcaagtggatgataccgaggacagcgacgaggagtggacacctcggcagcaagtgaaacccccatggatggcactgagagtggaacaaaggaagcaccagaagggcatgccgaaagccagtttctctaacgaaagctctttgaaggagctgagccgcaccgctaatctgcttaatgcttctggctcagaacaagctcagaaaccggtgtccccatctggagaagctagtacatccggacagcacagccgcctgaagctggaactcaggaaaaaggagacggagcgaaaaatgtatagcctccgcgaaaggaaaggccacgcctacaaggaggttagcgaaccacaagatgatgactacctctattgcgagatgtgccagaacttcttcatagattcctgtgcagctcatggaccccctaccttcgtaaaggactccgcggtggataaaggccacccaaaccggagcgccctctcccttccaccaggtctgcgcatagggccaagtggaatcccacaggctggcctgggggtatggaatgaggctagtgatcttccgctcggtctgcattttggcccctacgaggggagaattacggaagatgaggaagctgccaataacggatactcctggctgatcactaagggccgcaattgctatgaatatgtggacgggaaggataagtcctgggctaattggatgcgatacgtgaactgtgcccgggacgatgaagaacagaatcttgttgcatttcagtaccaccggcagatcttctatcgaacatgcagggtgattaggccgggttgcgagcttctggtgtggtatggggacgagtatggccaggagctgggtatcaaatggggctctaaatggaagaaagaattgatggccgggcgcgaacccaagcccgaaata

SEQ ID NO: 81 - DNA, 666 bp, synthetic construct
  source 1..666: mol_type = other DNA
gccaccatgaaaatgaataagtccagacagcgagttaggtatgactcctcaaatcaggtgaaggggaagccagatctgaatacggctctgcccgttaggcaaactgcatcaatcttcaaacaacccgtgaccaaaatcactaaccatccttccaacaaggtgaaaagcgaccctcaaaaggctgtggaccagcccaggcagctgttttgggaaaaaaagctgtctgggctgaatgcctttgatatagccgaggagctggtcaagactatggaccttcccaagggccttcaaggggtgggcccaggctgtacagatgaaaccttgttgtcagccattgcctctgcactgcatacttctacaatgccaattactggacaactgtccgccgctgtggagaagaaccctggcgtgtggctgaataccacacaaccactttgcaaagctttcatggtcaccgatgaagacatccggaagcaggaggaactcgtccagcaggttcggaaaaggctggaggaggcactgatggcggacatgcttgctcacgtcgaagaattggcgagggatggcgaagccccccttgataaggcctgcgcggaggatgatgacgaagaggatgaggaagaggaggaggaggagcccgatcccgatcccgaaatggagcacgtg

SEQ ID NO: 82 - DNA, 474 bp, synthetic construct
  source 1..474: mol_type = other DNA
gccaccatgggcgagaaaaatggggatgctaaaacattctggatggaactggaagatgacgggaaagtggatttcatattcgaacaggttcagaacgtgctgcagtctcttaaacagaagatcaaagacggcagcgccaccaataaagaatatatccaggctatgatcctggtaaacgaggccacgattattaattcctcaacttcaatcaaaggggccagccagaaggaagtgaacgcacagagttccgatcctatgccagtgacacagaaggagcaggaaaataagtctaatgctttcccttccacgtcttgtgagaattcattccccgaggactgcaccttcctgacaacagagaataaagagattttgagtctggaggacaaagtcgtagacttcagggaaaaggattccagtagcaaccttagctatcagtcccacgattgctctggcgcatgtctgatgaagatgcca

SEQ ID NO: 83 - DNA, 1479 bp, synthetic construct
  source 1..1479: mol_type = other DNA
gccaccatgctggcccggaattatcctaaacagaaggaggtagtctcagacgtggacatcagcaacggagtcgaaagcgttcccatctctttctgtaatgagatagattctcgaaaactgccgcagtttaaataccggaaaacagtctggcccagagcctacaacctgactaatttcagctctatgttcactgactcctgcgattgctctgaaggctgcatcgatatcacaaagtgcgcctgtcttcaattgaccgccagaaacgcgaaaacgtcacctttgagtagcgacaaaattacaaccggatacaagtataaacggctccagcggcagatccccacaggcatttacgaatgctctttgctttgcaaatgtaatcggcaactgtgccagaatagagtcgtccagcatggcccgcaggtgaggttgcaggtgttcaaaacagaacagaagggctggggcgtcaggtgcttggatgatattgatagagggacctttgtgtgcatttattccggtaggctgctgagccgagcaaataccgaaaaatcatatggtatcgacgaaaacgggcgcgacgagaacaccatgaaaaacattttttccaagaaaaggaaacttgaagtagcctgcagcgactgtgaggtcgaagtgctgcctctgggcctggaaacgcaccccaggaccgctaagaccgagaaatgtccaccgaaattctccaacaatcctaaggagctgacagttgaaacgaaatacgataacatctcaaggatacagtatcactcagtcattcgggaccctgaaagcaagaccgcaatatttcagcacaacggcaaaaagatggagtttgtgtctagtgagtccgtcactcccgaagataatgatggattcaagccacctagagaacacctcaacagtaaaaccaagggcgcacagaaagactccagttcaaatcacgttgatgagttcgaggacaatctgttgattgagagtgacgtgatagatattactaagtacagagaagagacacccccacggagcagatgtaatcaagccaccactctggataaccagaacattaagaaagctatcgaggtgcaaatccagaagcctcaagaggggagaagtactgcatgtcagcggcaacaggtcttctgcgatgaggaactgctgtctgaaactaagaataccagttcagactcactcactaaattcaacaagggcaatgtgttcctcctggatgcaactaaggaagggaacgtgggtcgcttcctgaaccattcatgttgtcctaatcttcttgtccagaacgtgtttgtggaaacacataatcgaaatttccctctggtggcattttttacgaaccggtacgtgaaggctcgcaccgaactgacctgggactacgggtatgaggcgggcaccgtgccggaaaaagagatcttctgtcagtgcggcgtgaataagtgcaggaagaaaatcctg

SEQ ID NO: 84 - DNA, 1374 bp, synthetic construct
  source 1..1374: mol_type = other DNA
gccaccatgaaaattgaagaagtgaagagcaccactaagactcagaggattgcctcccactcacacgtcaaggggctgggcttggacgagagcggccttgcaaaacaggctgcctccgggctcgttgggcaggagaacgcccgagaggcctgcggagtgattgtcgagctgataaaaagcaaaaaaatggctggacgggcggttctgctggccggtcccccagggactggaaagaccgctctcgcccttgcaattgcacaggagctcggctcaaaggtcccattttgcccgatggttgggtcagaagtctactccactgaaatcaaaaagaccgaggtcctcatggagaatttccggagagccatcggcctcagaatcaaagagactaaagaagtgtatgagggggaggtcactgagcttacaccgtgcgaaactgaaaacccaatgggaggctacggaaagacaatctcacacgtgattatcggtctgaaaactgctaaggggacaaagcagcttaagttggaccctagtatattcgaaagcctgcaaaaagaaagagtggaggcgggtgatgttatatatatagaggctaactctggcgcagtcaagaggcaagggcggtgcgacacctatgctacggagttcgatctggaggccgaagagtacgtccctctgccgaaaggagatgtgcacaaaaagaaggaaatcatccaggacgttacacttcacgatctggacgtcgctaacgctcgcccacaggggggccaggatattctctctatgatgggccagttgatgaaacccaagaagacggagatcaccgataaactgaggggggaaattaataaagttgtcaataaatatatcgaccaggggattgccgaactcgtacccggtgttctctttgtcgatgaagtccacatgctggatattgagtgctttacctacctccaccgagccttggagtcctccatcgcgcccattgtaatatttgcttccaaccgaggcaactgtgtgattagagggactgaagatattactagtccccatggcatccctctggatctcctggatcgggtgatgatcatcagaaccatgctgtatactccccaggagatgaagcagatcattaagattcgcgctcagacagaggggattaacataagcgaagaggccctgaaccacctcggggaaattgggacgaagactacactgaggtattccgttcaactgctgacgcctgccaacctgctggccaagataaatggaaaggattccatcgaaaaggagcacgtggaggagattagcgaattgttttacgacgcaaagagctctgctaagatcctggccgatcagcaggacaagtacatgaaa

SEQ ID NO: 85 - DNA, 2568 bp, synthetic construct
  source 1..2568: mol_type = other DNA
gccaccatgcacggaagctccctgatgaaaaaaaggcgaaactggcaccggcacgattatactgagatcgacgatgggagtaagcctgtgcaggcaggaacccgaacattcatcaaagagctgagatctagggtgtttccctctgccgatgagattataatcaaaatgcacgggagccagctgacgcagagatacctcgagaagcatggatttgacgtgcccatcatggtgcctaagctggatgatctgggcttgaggttgccaagcccaactttcagcgtgatggacgtagagcgatatgttggtggtgacaaggttattgatgttattgacgtagcccgacaagcagactcaaagatgacgctgcataattacgtgaagtattttatgaatcctaacagaccgaaagtgttgaatgtgataagcttggagttttctgatactaaaatgtccgaactcgttgaagtgcccgatatcgcaaagaaactctcctgggtggagaattattggccggacgatagtgtctttccaaagccatttgtgcaaaagtactgcctgatgggcgtccaagactcatatacagattttcatatcgatttcggtggaactagtgtatggtatcacgtcctttggggcgagaaaattttttaccttatcaaaccgaccgacgagaatcttgcacgctatgagtcctggtcatccagtgtaactcagtcagaggtgttcttcggagacaaagtggacaagtgctacaaatgcgtcgtgaaacagggacacactttgtttgtccccactgggtggatacacgccgtgctcacctcccaagactgcatggcctttggaggaaactttctccacaacctgaacattggtatgcagttgcggtgttacgaaatggagaagcggctgaaaactccagacctcttcaagttcccgttttttgaagctatctgttggtttgtggccaaaaacctcctcgaaaccttgaaggaactgcgagaagatgggttccagccccagacttacctcgtgcaaggggtaaaggcactccatacagctttgaagctgtggatgaagaaagaactcgtgtctgaacatgcatttgagatacctgataatgttagacctggccacttgataaaggaactcagcaaagtcatacgcgccattgaggaggagaacggaaagccagtgaagtcccagggtatccctattgtctgcccagtcagtcgcagcagcaacgaggctaccagcccttaccactctaggaggaagatgagaaagctccgggaccacaatgtcaggacacctagcaacctggacattctcgaactgcacaccagggaggtactcaagcgactcgagatgtgcccctgggaagaggacattttgagtagcaagctgaacgggaagttcaataaacatctgcaaccctccagcacagtgccggagtggcgggctaaggataatgatttgaggttgctcctgactaacggaagaatcatcaaggacgagaggcagcccttcgctgatcagagcctttacacagcggattccgagaacgaggaggataagcgcaggacaaaaaaagccaagatgaaaatagaagagagctccggagttgaaggcgtcgagcatgaagaaagtcaaaaaccactgaacggcttttttacccgcgtaaaaagcgaactgcggtccagatctagcgggtactccgatatttccgagtctgaggatagtggtcctgagtgtactgctctgaagtctattttcacaaccgaggaaagcgaaagctctggggatgaaaaaaagcaggagattactagtaacttcaaggaggagagtaacgtgatgcggaacttcttgcagaagtctcaaaagcctagccgaagcgaaattcccatcaagcgggagtgtcctacatcaacttctaccgaggaagaggccatccaggggatgcttagcatggcgggtctccactattctacctgcctccagaggcagatccagtccaccgactgctccggggagcgaaacagtctccaggatccttcctcctgtcatggaagcaatcatgaggttagacaactctatcgctatgataaaccggtcgagtgcgggtaccacgtcaaaactgaagacccggacttgcggacttcctcttggataaaacagttcgacacaagtcggtttcacccgcaggacctgtctaggtcccaaaagtgcattcgaaaagagggcagtagcgagatcagccaaagagtgcagagcagaaactacgtcgatagctcaggaagcagccttcagaatggcaagtatatgcagaatagcaacctcacctcaggagcttgccagatcagcaatggctcactcagtcccgaacggcccgtcggggaaacctcctttagcgttccactgcatcctactaagaggcctgcatctaatccaccccctatttctaaccaggctaccaagggcaagaggccaaagaaaggaatggcaactgcgaaacagcggctgggcaaaatccttaagttgaacagaaacgggcacgctagattctttgta

SEQ ID NO: 86 - DNA, 240 bp, synthetic construct
  source 1..240: mol_type = other DNA
gccaccatggaacctggatgtgatgaatttctgcccccccccgagtgtccagttttcgaaccttcctgggcagagttccaggatccactcggctacattgctaaaataagaccaattgcagagaaatccggaatctgtaagattcgccctcctgctgactggcagccgccgttcgccgtagaggtggataattttcggttcacgcctcgagtacagagactgaacgagcttgaagcccag

SEQ ID NO: 87 - DNA, 447 bp, synthetic construct
  source 1..447: mol_type = other DNA
gccaccatgggggcaaaccacgtgcagtgtaacactcacccttttgacaacgaagtgaaagacaaagagtataaaccccacagcatccctctcagacaatcagttcagcccagtaagtttagcagctattccagacgcgcaaaacggctgcagccagacccggaacctaccgaggaggatatagaaaaacatcccgagctgaagaagctccaaatttacgggcccggcccgaagatgatgggtctcgggctcatggccaaggacaaagacaagacagtccacaaaaaagtgacttgtccacctaccgtgaccgtaaaagatgaacagagtggaggagggaacgtttctagtaccctgctgaaacagcatctgagcttggaaccttgtactaaaactacaatgcaactgcggaaaaatcattccagcgctcagttcattgattcttac

SEQ ID NO: 88 - DNA, 1011 bp, synthetic construct
  source 1..1011: mol_type = other DNA
gccaccatgcttgcggaatgcaagcagcctccagaggctttcggcttcgagcaggccactcaggagtacagccttcagtccttcggagaaatggccgactcctttaaatctgactattttaacatgcccgtccatatggttcccacagagctggttgagaaagagttttggcggttggtgagcagcatcgaagaagacgtgacagtggagtacggtgctgatattcactcaaaggaattcggctcaggcttcccagtgagtaactctaaacagaaccttagccctgaagaaaaggagtacgcaaccagtggctggaacttgaacgtgatgccagtgctggatcaatctgttctgtgtcacatcaacgctgatattagtggaatgaaagtgccttggctgtatgtggggatggtgttctctgcattttgctggcacattgaggaccattggtcctactccataaactacctgcattggggcgaacctaaaacatggtatggcgtgccctcccttgctgcggaacatctcgaggaggtaatgaagatgttgaccccggaactttttgatagccaaccagacctgttgcaccagctcgtgaccttgatgaacccaaacacactgatgtcacatggcgtgcctgtggtccgcacgaaccagtgcgccggggagtttgtcatcacttttccccgcgcttaccacagtggcttcaaccagggttacaattttgccgaagccgtaaatttttgcacggctgattggctgcccgccggaaggcagtgcattgagcattatcgacgcctgcggcgctactgcgtgttctcccatgaagagctgatatgtaagatggctgccttccccgaaaccctggatttgaacctcgcggtggctgtgcataaggagatgtttatcatggttcaagaagaacggagactgcggaaggctctgcttgaaaaaggcgtgacggaagccgagcgcgaggcatttgagttgttgccggatgacgagaggcaa

SEQ ID NO: 89 - DNA, 1281 bp, synthetic construct
  source 1..1281: mol_type = other DNA
gccaccatgctccacaaactgaagatcagggcagagagctttgatacatgggcgaataaagtgcgagtggccctcgaggttgaagacggacggaaacggagctttgaagagttgcgggcgttggagagtgaggctcgggaaaggcggttccccaatagtgaactgttgcagcggctgaagaactgcttgagcgaagtcgaagcatgcattgcccaggtgctcgggctcgttagcgggcaggtggcacggatggatactccgcagctgacccttactgagctgagggtccttctggaacagatgggatctctcccatgtgcaatgcatcagataggcgatgtgaaagacgttctggagcaggtcgaggcttaccaggccgaggcccgcgaggctctggcaacgctcccatcctcccctggccttcttagaagcctgctggagaggggccaacaattgggagtagaggtcccggaagctcaccaactccagcagcaggtcgagcaggcacaatggctggatgaggtgaagcaggcactcgccccctccgctcaccggggaagcctcgtgatcatgcagggtttgctcgtgatgggagccaagattgcttcatccccctctgtcgacaaggctcgagcggaactgcaggagcttctcaccatcgccgagcgatgggaagagaaagctcacttttgcctcgaggctcgacagaagcatccacctgccacactggaagcgatcattagagagacggaaaatatccccgtccacctccccaacatccaagcattgaaagaggccctgacgaaggctcaggcgtggatagccgatgtggatgagatacagaatggcgatcactacccatgcctcgatgatctggaggggttggtcgccgttggtcgcgacttgcccgtgggactcgaggagctcagacagctggaactgcaggttcttacggcccacagttggagagagaaagcaagcaaaacctttctcaagaagaattcatgctatacccttctggaggtcctctgcccatgtgccgatgctgggagtgacagtaccaagaggagcagatggatggaaaaggctctgggtttgtatcagtgtgatacagagcttctggggctgagtgcacaggatctcagggaccctggttccgtcattgtcgcattcaaggagggagaacagaaagagaaagagggcatactgcagctgaggagaaccaatagcgctaagccatcaccactcgcgccgagcctcatggcgtctagtcccacgtcc

SEQ ID NO: 90 - DNA, 921 bp, synthetic construct
  source 1..921: mol_type = other DNA
gccaccatgcggagccgacgccctcgccttgagacgatcctcgccctgctggtcgccctgcagagactccctgtgagactccctgaaggagaagcgctccagtgtctgaccgagagggcaatcggctggcaggatagagctcgaaaggcacttgctagcgaagacgtgaccgcgctgctgcgccaactggcagagctccggcagcagctccaagccaaaccccgcccagaggaggcctcagtctacacctctgcaaccgcctgcgatccaattagggaaggcagtggcaataacatctccaaggttcaagggctgctcgagaatggtgactcagtgacgagtcccgagaatatggcgcctggaaagggatcagatctcgagctgttgtcaagtctgctcccacagctgactggacccgttctggagctgccagaggcgataagggcaccactggaagagctcatgatggagggagatctcctggaggtgactctcgatgaaaaccattctatatggcagctgctgcaagcggggcagccccccgatctcgacaggattcgcaccctgctcgaactggaaaagttcgagcaccaagggagccgaacccggagccgggccctcgaacgcaggaggaggaggcagaaggtggatcagggaaggaacgtggagaatctggttcaacaagaactccaaagtaagagagctcggtccagcggaataatgtcacaggtgggcagagaggaggagcactatcaggaaaaggcagaccgagagaatatgttcctgaccccctccacggatcatagtccgtttctcaaagggaaccaaaattctctgcaacataaggactctggtagttccgcagcatgtccttccctgatgccgcttctgcagctctcatactctgatgagcagcagctt

SEQ ID NO: 91 - DNA, 621 bp, synthetic construct
  source 1..621: mol_type = other DNA
gccaccatggtgaaacttgccaatcccctgtataccgaatggatactcgaggcaatcaagaaggtgaaaaagcagaaacagagaccctccgaggagaggatttgtaacgccgtctcttcttcccacggcttggacagaaagactgtgctggagcagctggagctgagcgtcaaggatggtaccatcctgaaagtttcaaataaaggactcaatagctataaggaccctgataaccccggtaggattgcgcttcctaagccaaggaaccatggtaaactggacaataagcaaaatgtggactggaataagctgatcaagagggccgtagaaggcctggccgagagtgggggctccacccttaagagcattgagagattcctcaagggtcagaaggatgtctcagctctctttggaggctctgccgccagcggctttcaccagcagctgcggttggcaataaagcgagccatcgggcacgggcggctgctgaaagacggacccctctaccgactgaacactaaagcaacaaatgtcgacggcaaggaatcttgcgagtcattgtcctgtctgccaccggtatccctgctgccacatgagaaggataagcctgttgctgagccc

SEQ ID NO: 92 - DNA, 1500 bp, synthetic construct
  source 1..1500: mol_type = other DNA
gccaccatgaagaagggtaggaagttgttgcaaaaaaaagcggcgcagattaagaggagatacacaaaccccatcggcagacctaagaatcgcctgaagaagcagaatactgtgagtaagggccctttctctaaggtgaggacaggccctggccggggccggaaaaggaagattaccttgagctctcaatctgcaagcagctctagcgaggaagggtatctcgaacgaattgatggacttgatttctgtcgggactccaacgtgagcctcaagtttaataagaaaacaaaggggctcattgatggcctcacaaagttttttacaccgtcccccgacggcaggaaggcgcgaggtgaagtcgtcgactactcagaacagtaccgcatcaggaagaggggaaatcggaagagtagtacgtctgattggccaacagacaatcaggacggttgggatgggaaacaggagaatgaggagcgcttgttcggatcccaggaaattatgactgagaaggatatggagctgtttcgggatatccaggagcaggccctgcagaaggtgggggtgacagggcctcctgacccccaagtccggtgccctagcgtgattgaattcggcaaatacgaaatccacacctggtactcaagtccataccctcaagagtactcccgactgccaaagctctatttgtgcgagttctgcctgaagtatatgaagagtaggaccatcttgcagcagcatatgaaaaagtgtggctggtttcacccacccgccaatgagatctaccgcaagaacaacatcagtgtgttcgaagtagatggaaacgtctctactatctactgccagaacctctgcctgctggccaaattgtttcttgatcacaagactctgtactacgatgtcgaaccttttctgttttatgttcttacccagaacgacgtcaagggttgccatctggtgggatatttcagcaaagaaaagcactgccagcagaagtataacgtttcctgcatcatgatcctcccgcagtaccaacgcaaaggctacgggcgattcctgattgatttcagctacctcctttctaagagggaggggcaggccggaagccctgagaaacctcttagcgatttgggaagactgtcttacatggcctattggaagtcagtcattctggagtgcctgtatcatcaaaatgataaacagataagcatcaagaagctctctaaactgactggaatttgcccccaggacatcactagcaccctccaccatctgaggatgctcgacttcaggtccgaccagttcgtgataatccgccgggaaaaactgatccaggatcatatggcgaagttgcagctcaatctgaggcctgtcgacgtggaccctgaatgtctgcggtggacacccgtcattgtctcaaacagtgtagtgagtgaggaagaggaggaggaagccgaagaaggcgaaaatgaggagccccagtgtcaggaacgcgagctcgag

SEQ ID NO: 93 - DNA, 1473 bp, synthetic construct
  source 1..1473: mol_type = other DNA
gccaccatgggcagcctgagcgcccccagcatgcagaacatggaaaccagtcctatgatggacgtccctagtgtgagtgaccattcccagcaagtagttgacagtgggttctcagacctgggctcaattgagtcaactacggagaattacgaaaacccaagcagctacgacagcacaatgggcggatccatttgcggaaatagttccagccaaagctcatgtagctacggaggactgtcctcaagcagttccttgacacagtctagttgtgtggtgacacagcagatggcctcaatgggtagctcatgctccatgatgcaacagagttcagtccaacctgccgctaactgtagcatcaagtctccccagtcttgcgtagttgagagacccccaagtaatcagcaacaacagcctcccccaccgcccccacagcagccacagcccccccctccccagccccagccggccccccagccacctcccccccaacaacagccacagcagcagccccaaccacagccacagcagcctcctcctccgcctcccccccagcagcagccaccactcagccagtgcagcatgaataactctttcacacccgcccccatgatcatggagatacctgaatctgggagtaccggcaatatctctatctatgagcgaattcccggggatttcggagctggatcttactcccagccttcagcgactttcagcctggccaaactgcaacagctgacgaacaccattatggatccccacgccatgccctacagccatagccctgccgtgacctcctatgcaacctccgtgagtctgtccaatacagggctggcccagctcgctccctcccatccgcttgcaggtactccacaagcccaggctacaatgaccccaccaccaaatctggccagcaccaccatgaatctcacctctcccctgctccagtgtaatatgagcgccaccaacattggcatccctcacacacaacggctccaagggcagatgcctgtgaagggacacatcagtatccgcagcaagagcgctcctctcccctctgccgccgcgcaccagcaacaactgtatggcagaagtccaagcgctgtagctatgcaggcagggccacgggctttggcagtgcaacgaggcatgaacatgggggttaatttgatgccgacccccgcctacaacgtcaactccatgaacatgaacaccctgaacgccatgaatagttacagaatgacccaacccatgatgaatagctcataccattctaaccccgcttacatgaaccagacggcacagtatcccatgcagatgcagatgggcatgatgggctctcaggcctacacacagcagcccatgcaacccaacccccacggcaacatgatgtatactggtcctagtcaccattcctatatgaacgcagccggcgtgcctaaacaatccctcaatgggccctatatgcgacga

SEQ ID NO: 94 - DNA, 2019 bp, synthetic construct
  source 1..2019: mol_type = other DNA
gccaccatgtcaggcctcggggaaaacttggaccccttggcttctgatagccgaaagcggaagctgccttgtgacacccccggccagggtctcacatgttcaggcgaaaagcgccggagagagcaagaatccaagtacatcgaagagcttgccgagcttatctcagccaatctgtccgatatcgacaactttaacgtgaagcctgacaagtgcgccattcttaaagaaactgtgcgacagattaggcagataaaggaacagggcaagaccatctctaatgacgatgacgtccaaaaggcagacgtcagttctacaggacagggcgtaatcgacaaggattccttggggcctctgctcttgcaagctcttgatggatttctgttcgtggtaaatcgcgacggaaatatcgtttttgtctctgaaaatgttacgcaatacttgcaatacaaacaggaagacttggtcaatactagcgtgtataatatattgcatgaggaggataggaaagacttcttgaaaaatctgcccaaaagcaccgttaacggagtgtcttggaccaatgagacacagaggcagaagtcccatacattcaactgccgcatgctgatgaagacgccccatgacatactcgaggatatcaatgcatcacctgagatgagacagagatacgagaccatgcagtgtttcgcccttagtcagcctagggcaatgatggaagaaggcgaggatctgcagtcctgtatgatctgtgtagccaggcgcataactacgggcgagcggaccttcccgtctaacccagaatcttttataacccgccacgacctgtccggtaaagttgtgaatattgataccaattcccttcgcagcagcatgcgaccaggattcgaagacatcatacgccgctgtatccagcgcttcttcagtctgaacgatggccagtcctggtcccaaaagaggcactatcaggaagcgtatctgaatggacacgcggagacacccgtgtaccgcttttcattggccgatggcaccattgtcaccgcgcagacaaagagcaagctgttccgaaatccagtcaccaatgataggcacggctttgtgagcacccacttcctgcagcgagagcaaaatggatataggccaaacccaaatccagtgggacaggggataaggcctcccatggctggctgtaattcctccgtgggtggaatgagcatgtcacccaatcagggactgcagatgccatcatcaagggcttacgggctcgctgatccaagtaccacagggcaaatgtccggcgcgcgctacggaggatcatctaatattgcctccctgacccccgggcctggcatgcagtccccaagttcttaccaaaacaacaattatgggctgaacatgtcttcacccccacatgggagtcccggactggcccccaaccagcaaaacattatgataagcccacgcaatagaggctccccaaagattgccagtcaccagttttctccagttgcgggcgtgcactcccccatggccagttccgggaatacgggcaatcactcctttagcagttcttctctttcagcactgcaggcgatctctgaaggggtagggacgtcactgctcagtacactctcaagccccggccccaaactggataacagtcctaatatgaacatcacccagcctagcaaggtgagtaaccaggacagcaagagtccgctgggcttctattgcgaccagaacccagttgaaagtagcatgtgtcagagcaacagcagagaccatctgagtgacaaagagagcaaggaatcatctgtcgaaggggcggagaatcagaggggacccctcgagagcaaaggacacaagaagctgttgcagctgttgacgtgctcaagtgacgatcgcggccatagcagcctgactaactcccccctggactcatcttgtaaggagtcctctgtgtccgtcaccagcccctccggtgtgagcagtagcacttccggaggagtttcatctactagc

SEQ ID NO: 95 - DNA, 1215 bp, synthetic construct
  source 1..1215: mol_type = other DNA
gccaccatgggcactcagaatcggccgctgcttagaaatagcctggacgacctggtgggcccgcccagcaacctggagggtcaaagtgatgaacgggccctcctggaccaactgcatactctcttgtctaacacagacgccactgggttggaagagatcgatagggccctgggaattcccgagctggtgaaccaaggacaggctttggagccaaagcaggacgcgtttcagggacaggaggctgcagtaatgatggatcagaaggctggactttatggacaaacataccctgcacagggaccccccatgcaggggggatttcacctccaaggtcaatccccctccttcaactccatgatgaatcagatgaatcaacagggtaacttccccctgcagggtatgcacccccgcgccaacattatgaggccacgaacaaacactcctaagcaactgagaatgcagctccaacagcggctgcagggacaacaattcctgaaccagagcaggcaggccctggaactcaagatggagaatcccacagccggaggtgctgccgtaatgagacctatgatgcagccacaggtttcctcacagcagggctttcttaatgctcagatggtggcccaacgctcacgcgagctgctgagccaccactttaggcagcaaagggtcgccatgatgatgcagcaacagcagcagcaacagcagcagcagcagcaacagcagcagcagcagcagcaacaacaacagcaacagcagcagcagcaacagacgcaggcattcagtccgccgcctaacgtgaccgcctctcctagcatggatgggctgcttgcaggccctaccatgccccaagcaccaccacagcaatttccataccagcccaactatggaatgggccagcagccggatcccgcttttgggcgcgtaagctccccccccaatgccatgatgtcatctaggatgggtcctagtcagaatcctatgatgcagcacccccaagcagctagcatttaccagtctagtgagatgaaaggatggccaagcgggaatctggccagaaatagcagcttctcacagcaacaatttgcacaccagggaaacccggcggtgtactcaatggtgcacatgaatggttcatctggacacatgggacagatgaatatgaatcccatgccgatgtccggaatgccaatgggtccagaccagaagtattgc

SEQ ID NO: 96 - DNA, 1455 bp, synthetic construct
  source 1..1455: mol_type = other DNA
gccaccatggcagcagacgaagtggcaggcggcgcccggaaggcgactaaaagtaagctgttcgagtttctggttcatggagtgagaccaggaatgccgagtggcgcccggatgcctcaccagggcgcaccaatgggccctcctggttctccatacatggggtcccctgcggtgaggcccggccttgcacccgccgggatggaacctgccaggaaaagggccgcccctcccccaggacagtctcaggcccagtcccagggacaacctgtgcccactgcaccagccagatcccgcagcgccaaaagacgcaaaatggccgataaaatcctgccccagaggatcagagagctggtaccagaaagccaggcatacatggacctgctcgcttttgaaagaaagcttgatcagacgattatgcggaaaagagtggatatacaggaggctctgaagcgacccatgaaacagaagcggaaactgcgactctatatatcaaacaccttcaaccccgcaaaaccagacgctgaggattcagacggatccatcgccagctgggagctccgggttgaaggaaaactgctcgatgacccttcaaaacaaaagagaaagttttcctcctttttcaagtctctggtgatcgaactcgacaaagatctgtatggtcctgacaaccacctggttgagtggcatcgaacccctacgactcaagagacagatggcttccaggtgaaaaggccaggcgatctgtccgtgcgctgcacactcctgcttatgctggattatcaacccccacagtttaaactggatccgcgcctcgcacgactgctggggctgcacacccaatccaggagcgccattgtgcaggctctctggcagtatgtaaagacaaatagactgcaggattcccatgataaagagtatattaacggcgataaatacttccaacaaatctttgactgcccccgcctgaagttttccgagatccctcagcgactcacggcgctcttgcttccacccgatcccatcgttatcaatcacgtgattagtgtggatccctctgatcagaagaaaacagcttgttatgacatcgacgtcgaggttgaggagcccttgaaaggacagatgagcagtttcctcttgagtaccgccaatcagcaggaaatctccgccctggatagtaagatccacgagaccattgaatcaattaatcaactcaagattcagcgggattttatgctcagctttagccgcgatcctaagggatacgttcaggacttgctgagatcacagagccgcgacctgaaggtgatgaccgatgtagccggcaacccagaggaagagaggcgagccgagttttatcaccagccatggtcccaggaggcggtgagcagatatttctattgtaagatccagcagcggcgccaagaactggaacagtccctcgtcgtacggaatact

SEQ ID NO: 97 - DNA, 3087 bp, synthetic construct
  source 1..3087: mol_type = other DNA
gccaccatgtatgaggggaaacatatccacttttctgaggtggacaacaagcctctgtgtagctatagtcccaagctttgcaagcagaggcgcttgaatggttacgcattctgtatccgccacgtgctggaggataagaccgcccccttcaaacaatgcgagtacgtcgcgaaatacaactcacagagatgcacgaacccgattcccaagtctgaggaccgccgatactgcaattcacatttgcaagtattggggtttatcccaaaaaaggagagaaagaaaaagaatgaccctattgacgaagtgaaagttcggcatcagatggatactatggcattctctcttaccgtccctacacttgccctgaaaatgccaaatggacttgatgggatgtcccttagccccccaggggctcgcgtgcctcttcactatcttgagacggagctcgaggaccccttcgcattcaatgaggaagacgacgacttgaagaagggagctaccgtaagaaagaagctccagtctaaacttgcccagaatagacagcgccagagagaaacggagattctcaaggtgaggcaggaacacttctccccccctcctgccccatctcagcagcaaccgcctcagcaacattcacacctttctcctttgagcaccagtcttaagccacctgcgccgccacagggttctgtctgcaagtccccgcagccccagaatacctcactgcctatgcagggggtggctccgaccactcatacaattgcacaggcacgacagctctcccacaagagacccctcccactgctgccttcaagcagggctccaaccgttgatccaccgcgcacagatcggattcttatgaaagcaaccgccttcagcccccacttctcctgtatctctagactgcagcggctggtgaagctgtgtacccagaagcaccagttggataccgacctgttcccccacctgggccttgactggagcgaggagagcggcgaggagcctgaggatagtgagcaggcatctccataccaggtggcctggtccattcgggagacccttagataccaaaggcatgcttccgacgatgacgacgcggagagtagatctagcagagtcacacaactctgtacctactttcagcaaaagtacaagcacctctgccggctggagcgggccgaaagcaggcagaaaaagtgtagacacactttccgcaaagccctgctccaggctgcttccaaagagcccgagtgtacagggcaactcattcaagaactgagacgggctgcctgctcaagaacaagcatcagtcggacaaagctgcgcgaagtcgaaccagctgcctgttccgggactgtcaaaggcgaacagtgcgctaacaaagccctgccttttactagacattgcttccagcatattctcctcaaccacagccagcagcttttttccagttgtaccgcaaagttcgctgacgggcaacagtgtagtgtacctgtgtttgacataacgcatcagacacccctctgtgaggaacacgcaaaaaaaatggacaactttctgcgaggagacaattccaggaaggtgcagcatcagcagcaacgaaagcctcgcaaaaaaaccaaacctcccgctctgacaaaaaagcacaagaagaagagaagacgcgggccacggcgcccccaaaaacccataccacccgctgtgccccaggggaacctgtccatgcctgcgtctgtaagcctgcctgtggaagcgagtcacataaggtcccccagcacccccgaattgagcgctgacgagctgcctgatgatatcgcaaatgaaatcaccgacatcccccacgatctcgaacttaatcaggaggatttttctgacgttctgccaaggctgcctgatgatctccaggatttcgacttcttcgaaggtaagaatggcgacttgctcccaactaccgaagaagccgaggagcttgaacgagcactgcaggcggtgacctcacttgaatgcctgagtacaatcggggttctggcacagtctgatggcgtgcctgtccaggaactctccgaccgcggcatcggcgtcttttccactgggacgggggcaagcggtattcagtctttgtctagggaggtcaatactgatctgggagagcttctgaacggacgaatagtccacgataatttctcaagcctcgaactggacgaaaatctgcttcggtcagccacactgagtaatcctccaacacctctggccggccaaattcaggggcagttttccgccccagcgaatgtagggcttacctcagccacactgatcagtcaatcagctctgggtgaacgagcattccccggacagtttcatggcctccatgatgggagccacgccagtcagcggccacaccccgcccaactgctgtccaaggccgatgacctgatcacttctagacaacaatattctagcgaccatagccatagtagtccacacggcagtcattacgattctgaacacgtcccttcaccatactctgaccatatcacaagcccccatacaactagttatagcggtgacaatatggctgctacctttagcgcagaaatgcccatcatggcacagcacctcctgcccacacagctggaggtacccctgggcggcgtggtaaacccgcggacccactggggcaacctccccgtaaacctgggagatccaagtcccttctccaatctcctcggcgcagatggacacctgctttccacctctctttcaaccccaccgaccacctccaactcagaaaccacacagcctgcctttgcaacggtgaccccaagtagtagttccgtgctgccaggcctgccccagaccagcttctcagggatgggacctagtgcagagctgatggccagcactagccctaaacagcagctgccccagttttcagctgcattcggtcatcagctcagttcacactcaggcatccctaaagatctgcagccgagtcattcctccatagcgcctccaactggctttactgtgacaggggcaacggctacctccactaacaacgcatcttcaccgttcccatcacccaac

SEQ ID NO: 98 - DNA, 1290 bp, synthetic construct
  source 1..1290: mol_type = other DNA
gccaccatggagccactcaaggttgagaagttcgccaccgctaaacgcggaaatggtctcagagcggtgactcctctgagacctggtgagctgctttttagatctgatccgctcgcttacaccgtgtgtaaggggagtcgcggagtcgtctgcgacagatgcctgctgggcaaggaaaagctcatgcggtgctcccagtgccgcgtcgccaaatattgctccgcgaagtgccagaaaaaggcatggcctgaccataaaagggaatgcaaatgtctcaaaagttgcaaacctcgctacccacccgactccgtgagactgctgggccgggtggtgttcaaactcatggacggcgccccaagcgagtccgaaaaactgtatagtttttacgacctcgagtctaacataaacaagctgactgaggataagaaggagggactgcggcagctcgttatgacgtttcagcattttatgcgagaagagattcaggatgcaagtcagctgccccctgcctttgatctgtttgaggcattcgctaaagtcatctgcaacagctttactatctgcaacgcagagatgcaggaggtcggcgtgggcctttacccatccatttcattgctcaaccactcttgtgatcccaattgttccatcgtcttcaacgggccacacctgctgctgcgcgctgtgcgggacattgaggtgggagaggagctgaccatttgctacctcgatatgctgatgaccagcgaggagagaagaaaacagctcagagaccaatactgttttgagtgtgactgcttccggtgtcaaacccaggataaggacgcggacatgcttacgggtgacgagcaggtttggaaagaggttcaggagtccctgaaaaagatagaggagctcaaagcgcattggaaatgggaacaggtgctggctatgtgccaggccattataagctcaaatagcgaaaggctgcctgatattaacatttatcagctcaaggtgctggattgtgctatggatgcttgtattaatcttgggctcctggaggaggcattgttctacggcacccgcacaatggaaccatatcggatcttttttcccggctcccaccctgtcagaggagtccaggtgatgaaggtcggaaagctgcaactccatcaagggatgttccctcaggccatgaagaatctgcgcttggcttttgatataatgcgggtgacgcatggacgagaacactctctgatcgaagaccttatactgcttctggaagagtgcgacgccaacatcagagcttct

SEQ ID NO: 99 - DNA, 3129 bp, synthetic construct
  source 1..3129: mol_type = other DNA
gccaccatgcacggcaaaagcaccttgaagaagaaaagaacctggcataaacatgggccagggcaggcaccggatgttaaaccagtgcagaatgggtcacaattgtttatcaaggagctgcggtcaagaacttttccaagcgcagaagatgtggtcgctcgcgtgccaggaagccagcttaccttgggctacatggaggagcacggctttactgaacctattctggtcccaaaaaaggacgggctgggtcttgcagtgccagccccaacgttttatgtgtcagatgtagagaactacgtgggacccgaaaggtccgttgatgtgactgacgtcacgaagcagaaagactgcaagatgaagctgaaagagtttgtggactactattattctacaaaccgaaagcgcgtcctgaacgtcacaaaccttgaattttccgatacaagaatgtcttcattcgtcgagcctcccgatattgtcaaaaagctgtcatgggtggagaattattggccggacgacgctcttcttgctaagcctaaagtgaccaaatactgtcttatctgtgtaaaggactcatatacagattttcacattgacagtgggggagcctcagcgtggtaccacgtcctgaaaggcgagaagacgttttatcttatccggcctgcatccgccaatataagtctttacgagcggtggaggtcagcttccaatcactctgaaatgttcttcgcggaccaagttgataaatgttacaagtgtatcgtaaagcaagggcagacactgttcattccctccggatggatctatgcaaccctcacacctgtagactgcttggccttcgctggacactttctgcactccctgtccgtcgagatgcagatgcgggcctacgaagttgagcgcaggttgaaattgggaagcttgactcagtttcccaattttgagacagcttgttggtatatggggaaacatctcctggaagcatttaaaggaagtcacaagagcggaaagcagctccccccccaccttgtgcagggggctaagattcttaacggcgcctttcggagttggacaaaaaaacaggcactggctgagcatgaggatgaacttccagaacacttcaaacccagtcagctcataaaagatctggccaaagagatcaggcttagtgagaacgcttctaaggccgttcgaccagaagtaaacaccgtggcatcaagcgatgaggtgtgcgacggggaccgagagaaagaggagcccccatcccctatagaagctacaccaccccaatccctgctcgagaaggtgagtaaaaaaaagactcctaaaacggttaaaatgccaaaaccctcaaagatacccaagccacccaagccccccaaaccgccacgcccccccaagactctcaagttgaaggatggggggaaaaaaaaggggaagaagtcacgggagtcagccagccctacaattccaaaccttgatctgctcgaagcccacaccaaggaggcacttacaaagatggaaccaccgaaaaagggcaaggcaacaaaatctgttctgagtgtgcccaataaggatgtggtgcacatgcagaatgacgttgaacgcctggaaatcagggagcagaccaagagtaagagtgaggccaaatggaagtacaaaaacagcaaacccgattccctcttgaaaatggaggaagagcagaaactggaaaaatctcctttggctggcaataaggacaataagtttagcttctcttttagcaataagaagctgctgggctctaaagcgctgcggccacccaccagcccaggcgtgttcggagctctgcagaattttaaagaagacaaaccaaaacccgtccgggatgaatacgagtacgtgtcagatgatggtgagctgaaaatcgatgagttccccattagacgaaagaaaaatgctcccaaacgggacctgagttttctgctggataaaaaagccgtgcttcccactcctgtgaccaagcccaagctcgacagtgcagcttataaaagcgatgattcatctgacgagggatccttgcatatcgacacggataccaagcctggccgcaacgctagagtgaaaaaggagtctgggtcttccgccgctggaatcctcgatctcctccaggctagcgaagaagtaggggctctggaatacaatcccagttcccagccaccggctagcccctcaactcaggaggccatccagggcatgttgagcatggccaacctgcaggcttcagactcctgcttgcagacaacctggggcgcggggcaggccaagggcagttctctggccgcacatggtgctcgcaagaatggcgggggaagtggaaaaagtgctgggaaaagacttctgaagagagccgcaaaaaacagcgtggacctggacgattatgaggaggaacaggaccacctcgacgcctgtttcaaagatagcgactatgtgtatccgtcactcgaatcagacgaagacaatccgatatttaagagtcgatctaagaaacgaaagggatccgatgacgccccctactcccccacggccagagtgggcccttccgtgccacggcaggacagaccagtgagggaggggacaagagtggcctcaatcgaaaccggattggcggctgctgctgccaaactgtcccagcaagaagaacagaagtctaagaagaagaagtccgccaaaagaaagctcactcctaacacaacttccccgagcacttctacaagcattagtgctggcacaacatcaacctctactacacccgccagcacaacccctgctagcaccaccccggcctcaaccagtaccgccagctcacaggcaagccaggagggttcctcacctgagccaccacctgaaagccactcatcatctcttgcagatcacgagtacaccgccgctggaacgttcacaggggcccaggccggccggacaagccagcctatggcccccggggtttttctgactcaacgccgcccgagcgcctcatcaccaaacaataacaccgccgccaaggggaagcgcactaagaagggaatggccacggctaagcagcggcttggaaagatactcaagattcatcgaaatggtaaattgctgctg

SEQ ID NO: 100 - DNA, 1104 bp, synthetic construct
  source 1..1104: mol_type = other DNA
gccaccatggatagtgacgatgagatggtcgaggaagcagtagagggacatctggacgatgatggcctcccacacggattctgtacagtgacatacagcagtactgatcgatttgagggcaattttgtccatggtgagaaaaatggcagaggcaaattcttcttcttcgatggctcaaccctggagggatactatgtggatgacgcactgcaggggcagggggtatatacctatgaggacgggggagtgctccaagggacttacgtggacggcgaactgaatggcccagcccaagaatacgataccgacggacgcctgatctttaaggggcagtataaagacaacatcaggcatggcgtttgttggatatactaccccgacggcggctctctcgtaggtgaggtgaacgaggatggggaaatgacaggtgagaagatagcttatgtttatccggatgaaagaactgcactgtacggcaaatttatcgatggagaaatgattgaaggtaagctcgccacactgatgagtactgaagaaggacggccgcatttcgaactgatgcctggcaactccgtatatcatttcgacaagagcacttctagctgcataagcaccaatgccctgttgccagatccatatgaatctgaaagggtatacgtcgctgagtccctgatctctagtgccggcgagggtctcttcagtaaagtggcagtgggaccaaacacagttatgagcttttacaatggcgtcaggatcacacaccaggaggttgactccagagattgggcactcaatggaaacacactgagcctggatgaggagaccgtgattgacgtgcctgagccgtacaaccacgtgtccaagtattgtgcttccctgggccacaaggcaaatcactctttcacccctaactgtatctacgacatgtttgtgcatccccggttcgggccaattaagtgcatccgaactctgcgcgccgtggaggctgacgaagaacttaccgtggcctacggttatgatcatagcccccctggaaaatcaggacctgaggccccagagtggtatcaggtggagctcaaggcgtttcaggcgacacagcaaaag

SEQ ID NO: 101 - DNA, 591 bp, synthetic construct
  source 1..591: mol_type = other DNA
gccaccatggccgctggaatgtatctcgaacactatctggattcaatcgagaacctgccattcgagctgcagagaaactttcaattgatgagagatctggatcagcgcacagaagaccttaaagctgagatagacaaactggcaacggaatatatgtctagtgcaagatccctgtcatccgaggagaagctggccctgctgaagcagatacaggaggcctacggaaagtgtaaggagtttggagatgataaagtccaactggctatgcagacatacgagatggtagataaacacatacgcaggctggatacagacctggctcggtttgaggctgatctgaaagaaaagcagattgagtcttccgactatgattcatctagcagtaagggtaagaagaaaggtcgaacccagaaggagaaaaaagctgcgcgcgcgagaagcaaaggcaagaactccgatgaagaagcaccaaaaactgcgcagaaaaagcttaagttggtgcggacttctccggaatacggtatgccaagcgtaacatttggctctgtccacccttcagacgtgctggatatgccagtcgaccccaatgag

SEQ ID NO: 102 - DNA, 2646 bp, synthetic construct
  source 1..2646: mol_type = other DNA
gccaccatggagagacctcctgaaacccccaccgttgatccaaccgtcaaatacgagaggcagccagaatatctggatgccactggcggcacactgcatccctatcagatggaaggcttgaactggttgcggtttagctgggcccagggcacggacactattctggcagacgagatgggactgggcaagaccgttcagacggccgtgttcctgtattctctgtacaaggaaggacattccaaaggccccttccttgtttccgctccactgtctacaatcatcaattgggaaagagaattcgaaatgtgggctcccgatatgtatgttgtcacgtatgtgggtgacaaggactccagggccattatcagagagaatgagttcagttttgaagataatgccatcagaggaggaaagaaggcctcaagaatgaaaaaggaggcctccgttaaattccatgtgttgctgacatcttatgaattgatcaccatcgatatggccattctcggttcaatcgactgggcctgcctgatagttgatgaagcccatcgcctgaagaacaaccaaagcaaatttttccgagtcctgaatgggtactcccttcaacataaactgctgcttacagggacgcccttgcaaaataatctcgaagagctgtttcatctgctgaacttcctgactcctgagagattccacaacctcgagggctttctggaggagttcgccgatatcgcgaaggaagaccagattaagaagctgcatgatatgcttggtccccacatgctgagacgattgaaggcagacgtgttcaagaatatgccctctaagactgaactgatcgtgagggtcgaattgtctcccatgcagaaaaagtattacaagtacatattgactcgcaactttgaagccctgaacgctagggggggcggaaatcaagtgagtcttctgaatgtcgtaatggacctgaaaaagtgctgcaaccatccatatctcttccccgttgctgccatggaggccccaaagatgccaaacggtatgtacgatggctccgcccttatccgggcctcagggaaactgctcctgctgcagaaaatgctgaaaaacctgaaagaaggtgggcacagagtcttgatcttcagccagatgacaaagatgttggacttgctggaagatttcctggagcacgagggttataagtacgaaaggatcgacggtggtattacgggaaatatgcgccaggaggccattgacaggtttaatgctcccggagcacagcaattttgttttctcctgagtacacgagcaggcggacttggcatcaatcttgcgactgctgataccgttatcatctacgattccgactggaatccccacaacgacatccaagcctttagccgagctcaccggattggccaaaacaagaaggtgatgatctacagatttgtcacgcgggcttctgtggaagagcgcattacacaggttgccaagaaaaagatgatgctcactcacctggtcgtgcgacccggactggggagtaagaccggaagcatgagcaaacaggagctcgacgacatccttaagttcggaactgaggaactgttcaaggatgaagctaccgatggcggcggggataataaggagggcgaggattctagcgtgatccactatgatgataaagctattgaacggctgctggacagaaatcaagatgaaaccgaggacactgagctgcagggcatgaacgagtatctcagtagcttcaaagtcgcccaatatgtagttcgggaagaggaaatgggggaggaggaggaagtggaaagagagataatcaagcaggaggagtcagtggatcctgactactgggaaaaacttctcagacaccactacgagcagcagcaagaggacctcgcaaggaatctcggcaaaggaaagcgaatccggaagcaggtgaactacaatgatgggtcccaggaggatagagactggcaagatgatcagtccgacaatcagtctgactattccgtggccagcgaagagggagacgaagacttcgacgagcgatctgaggcccctaggagaccatccagaaaaggtctgcggaatgacaaggataagcctttgcccccactgctcgctagagtcggtgggaacatcgaggttttggggtttaatgcccgccaaaggaaggcttttctgaatgcaatcatgaggtacggcatgcccccacaggacgcattcacaacacagtggctggtgcgggatttgcgaggaaaatcagaaaaggagtttaaagcttacgtgtccctctttatgcgacacctgtgtgagcccggggccgacggtgcagagacctttgcagatggagtgccaagggagggcctttctaggcagcatgtactcaccagaattggcgtaatgagcctcatcaggaagaaggtgcaggaatttgagcacgtgaacggtaggtggtctatgcccgaattggcggaagtagaggaaaataagaaaatgtcccagcctggtagcccttcacccaagactccaacccccagcacgcctggagacacacagccaaacacccctgcccctgtccctccagctgaagacggaatcaagattgaagagaacagtctgaaggaagaggagtca

SEQ ID NO: 103 - DNA, 1017 bp, synthetic construct
  source 1..1017: mol_type = other DNA
gccaccatgatcgagggggagaaggaagtgaaatctactgccccggagactgcaatcgagtgtacccaggcgccggccccggcaagcgaagacgaaaaggtggtagttgaaccccccgagggtgaagagaaggttgagaaggccgaggtcaaagaaagaacagaggaacctatggaaaccgaacctaagggtgctgccgacgtcgagaaagtggaagaaaaatctgccatcgatctcaccccaattgtggtggaagacaaagaagagaagaaagaagaagaagaaaagaaggaagtgatgcttcagaacggcgagacaccaaaagacctgaatgatgagaagcagaagaaaaatatcaagcaaaggtttatgttcaatattgccgatggaggcttcaccgaactgcattcactctggcagaatgaggaacgcgctgcaaccgtgacgaagaagacttacgagatttggcatagacgccacgactactggctgttggcaggaataatcaaccacggctatgcccgatggcaggatatccagaatgatccgaggtatgccattctgaatgagccctttaaaggtgagatgaaccgcggcaacttcctggagatcaagaataaatttttggctagaagattcaaactccttgaacaagccttggtgattgaggagcaactgcgccgagctgcctatctcaatatgagtgaggacccatcccatcctagtatggcactgaacacgagatttgccgaggtcgagtgcctggctgagtctcaccagcatctctccaaagagtcaatggcaggcaacaaaccagcaaacgccgttctgcacaaggtgctgaagcagctggaggagcttctttctgatatgaaagctgacgtgactcgactgccagccaccatcgcaagaatcccacctgttgccgtccggctgcagatgtctgagaggaatatcctctctaggctcgctaatagggctccagagccgacacctcagcaagtcgcgcaacagcag

SEQ ID NO: 104 - DNA, 1917 bp, synthetic construct
  source 1..1917: mol_type = other DNA
gccaccatggccgccatggctgtgggcggcgccggcggaagtcgggtttctagcggccgggacctgaattgcgtgccagaaatcgcggacaccctcggcgcagtggcgaaacagggcttcgatttcttgtgtatgcccgtgtttcacccccgatttaaacgcgagttcattcaggaacctgctaagaatagacctgggccccagaccagatctgacctgctgctgtctggccgggattggaacacgctcatcgtgggaaagctcagtccgtggataagacccgacagcaaagtggaaaaaattagaaggaacagcgaggccgctatgctccaggaactcaattttggcgcgtatcttgggctccccgcttttctgctgccactgaatcaggaggataacactaatttggctcgcgtcctcacaaaccatattcacaccggccatcatagctctatgttctggatgcgggtcccacttgttgctccagaggacctcagggacgacatcatcgaaaacgctcctaccacccatactgaagaatacagtggtgaggaaaaaacgtggatgtggtggcataactttagaaccttgtgcgattacagcaagaggattgctgtggccctggagatcggagcagatctgccttcaaaccacgtgatcgacagatggcttggcgagcccattaaagctgctattcttccaaccagcatctttctcaccaacaagaaagggttccctgtgctgagcaagatgcatcagagacttattttcagactcctgaaactggaagttcagttcatcatcacgggcacgaaccaccattccgagaaagagttctgtagctatctgcagtacctggaatatttgtctcaaaacagacctcctcccaacgcttatgaactgtttgctaaaggatatgaggactacctgcagtctcccctgcagcccctgatggacaatcttgagtcccagacctatgaggtttttgagaaggacccgatcaaatatagtcagtaccagcaggctatctataagtgccttctggaccgcgtcccagaggaagaaaaggataccaatgtgcaggtgttgatggtgctgggagctggccggggtccactggtgaacgctagtctgcgagccgctaagcaggccgaccgaagaatcaaactgtacgcggtcgagaaaaacccaaacgccgtagttaccctggagaactggcagtttgaggaatggggatctcaggtgaccgtggtgtccagtgacatgagagaatgggtcgctccagaaaaggccgatatcatcgtgagcgaactgctgggatccttcgccgacaatgagctgtctcctgaatgtctcgacggcgcacagcatttccttaaggatgatggcgtaagtattcccggggagtataccagctttctcgcccccataagctcctcaaagctctacaatgaggtacgagcctgcagagagaaggatcgggacccagaggctcagtttgagatgccctacgtagtgaggctgcacaacttccaccagctgagcgccccccagccttgtttcacttttagtcaccctaatcgggacccgatgattgacaacaaccggtattgcacccttgaatttcccgtggaagtcaatactgtgctgcacggcttcgctggttatttcgagacagtgctctatcaggatattaccctctcaataaggcctgaaactcattcacctggtatgttttcatggtttcctattctgttcccgataaaacagcctataactgtcagagaaggccagacaatatgtgtgcgattttggaggtgcagcaattcaaagaaagtttggtatgagtgggccgtgacagcgcccgtctgctccgcaatacacaacccaacaggtagatcctacaccatcggcctg

SEQ ID NO: 105 - DNA, 1476 bp, synthetic construct
  source 1..1476: mol_type = other DNA
gccaccatgaccatcggcaggatggagaacgtcgaagtctttactgccgagggtaagggccgcggcctgaaagccacgaaagagttttgggcagcggatatcatctttgccgagcgggcttatagcgccgtagtgtttgacagcctggtcaatttcgtgtgccacacctgcttcaagcggcaagaaaagctccatagatgtggtcaatgcaaatttgcgcattattgcgaccgcacttgtcagaaagatgcctggctcaatcataaaaacgaatgttccgctatcaagaggtacgggaaggttccgaacgaaaacatccggttggctgcacgaataatgtggcgggtggagagagaaggcactggccttacggaaggatgtctcgtcagtgtggacgatttgcagaaccatgtagagcactttggcgaagaggaacagaaagacctgagagtagacgtggatacctttctgcaatactggcccccacagtcccagcagttttctatgcagtacataagtcacatcttcggtgtcataaattgcaacggcttcaccctctctgatcaaagaggtctgcaagctgtgggcgtgggtatctttccgaatctcggactggttaatcacgactgctggcctaactgtactgtgattttcaataacggaaaccatgaagctgtgaaatcaatgttccatactcaaatgagaattgagctgagggccctgggcaaaatttccgaaggggaggagctcacagtgagttatatagactttctgaacgtcagtgaagagcggaagcgccagttgaaaaagcagtactattttgactgtacttgcgagcactgccagaagaaacttaaggatgacttgtttctcggtgttaaggataatcctaaaccgagtcaggaagtagttaaggaaatgattcagttctccaaggatactctggaaaagatagataaagcccggagcgaggggctctaccacgaagtggtcaaactctgccgcgaatgtctggaaaaacaagagcccgtgtttgcagatactaacatctacatgctgcgaatgctcagcatagtgagtgaagtgctctcctatctccaagcattcgaggaagctagcttctatgctaggagaatggtagacgggtacatgaagctttatcatccaaacaatgcccaacttggtatggcggtcatgcgggcagggctgacgaactggcatgctgggaatatagaggtgggccatggaatgatctgcaaggcttatgctatcctgctcgttactcatggaccgtctcatcctattacaaaggacctggaggccatgagggtgcaaaccgagatggaactgaggatgtttaggcagaacgaattcatgtattataagatgagagaagccgcactcaacaaccaacccatgcaagtcatggcagagccctctaatgagccatcacctgccctctttcataaaaaacag

SEQ ID NO: 106 - DNA, 1284 bp, synthetic construct
  source 1..1284: mol_type = other DNA
gccaccatgtccggtggggtatacggaggcgacgaagtcggagcccttgtgtttgacattggttcattctccgtgcgagccggctacgctggggaggattgcccaaaggcagattttccaactaccgtggggctgctggcggctgaggagggcgggggcctggagcttgaaggggacaaggaaaagaagggtaaaatcttccatatcgataccaacgccctgcacgtgccacgagacggggccgaggtgatgtctccacttaagaacgggatgattgaagattgggaatgctttagggccatcctggatcacacatatagtaaacacgttaaaagcgagcccaacctgcatcccgtactgatgagcgaggcgccatggaacacccgcgctaaacgcgagaagcttacagagctgatgttcgaacagtataacattccagccttctttctgtgtaaaacagctgtgctgacagccttcgccaatggccgcagcacgggcctggtgctggacagcggggctacccacacaacagctatacctgtgcatgatggttacgtccttcaacaggggatcgtcaagtcccccctcgccggcgacttcatcagtatgcaatgtcgcgagcttttccaggagatggccatcgatatcatacctccctacatgatcgcagctaaggagcctgtgcgcgaaggcgcgccaccaaactggaaaaagaaagaaaaacttccgcaggtcagcaagtcttggcacaactatatgtgtaacgaagtcatacaggacttccaggctagcgtccttcaagtcagtgactctccctatgacgagcaggtggcggcacaaatgccaacagtgcactacgagatgcccaacgggtataataccgattacggtgcagaacgactgaggatacctgagggcctgtttgatcccagcaacgtgaagggactgtcaggaaatacaatgctgggagtgggccatgttgtgaccaccagtattggcatgtgcgatattgatatccggcccggtctttacggctctgtgatcgtgactgggggcaacactcttctgcagggctttactgatagactgaacagagagctgagtcagaaaactcccccctcaatgcggctgaaactcattgcaagcaacagtactatggaacggaagttttctccatggatcggtggctctatactggcttcactcgggaccttccagcagatgtggatctccaaacaggaatacgaggaagggggaaagcagtgcgtggagaggaagtgccca

SEQ ID NO: 107 - DNA, 2124 bp, synthetic construct
  source 1..2124: mol_type = other DNA
gccaccatgtaccgactcagaaagtcccgcccccgcagcgaaacagaggagatgggcgatgaagaagtgttttcttggctgaagtgcgccaagggacaaagccacgagccagagaacctcatgccaacacagataattccaggcacagcactgtataatattggggatatggttcacgctgcaagagggaagtggggcataaaagctaattgcccatgcatcagcagacagaacaagagcgtgctgagacccgcagtcaccaacggcatgtcccaactgccatcaataaacccgtccgcaagtagtggaaacgagactaccttcagcgggggcggcggccccgctccagtgaccactcctgagcccgatcatgtgcctaaagccgatagcacggatattcgaagcgaggagcccctgaagacagactcttctgcctcaaattctaactcagagctgaaagctattaggccgccttgcccggacactgctcctcctagcagtgccctccactggctggccgatctggcaacccagaaagccaaagaggaaacaaaggaggctggctccctgcggtctgtgctgaacaaggagtcacactccccatttggactggattccttcaattctaccgccaaagtaagccctctcacccccaagctctttaatagtcttctcctgggaccaaccgcaagcaataataaaacagagggttcctcactgagggatttgttgcattctggaccagggaagctgcctcagacccctcttgacacaggaatcccttttccaccagtattcagcacgagtagcgctggtgtaaagtccaaggccagtctgcctaatttcctcgaccatattatcgcttccgtcgttgagaacaagaaaacaagtgacgcgagtaagcgcgcgtgtaacctcacagacacccaaaaagaggtgaaggagatggtgatgggcctgaatgtgctcgacccccatacctctcactcctggctttgcgacggaaggctcctttgcctccatgatccctctaacaaaaataactggaaaatcttccgcgaatgctggaagcagggccagcccgtgctggtgtccggagtgcataaaaagctcaaaagcgagctctggaagccagaggctttttcccaggagttcggagatcaagatgtcgatttggtgaactgcaggaactgcgctatcatttccgatgtcaaggtccgggatttctgggacgggttcgagattatctgtaagaggcttaggagcgaggatggacagcctatggtcctgaaattgaaggattggccacctggcgaagacttcagggatatgatgccaaccagatttgaggatcttatggagaatctgccattgcctgaatacactaagagggacggcagactgaacctggcgagccgccttccttcctacttcgtgcgccccgatctgggacctaaaatgtacaacgcttacggcctgataaccgctgaggaccggagggtgggcacaacaaatctccatttggacgtctccgacgccgtgaacgtgatggtgtacgtgggaatcccaattggagaaggagcccacgatgaagaagtgctgaagactatcgacgagggcgatgcggatgaggtgactaaacaacgcattcatgatgggaaagaaaagccgggagcactctggcacatttatgcagccaaggatgctgaaaagatccgcgagcttctcaggaaggttggcgaggagcagggtcaggagaaccccccggatcacgaccccatacacgaccagtcctggtatttggaccaaactctccggaagcgcctctacgaagaatatggtgtccaaggatgggccatcgtacagtttctcggggacgcagtttttatacccgctggggcacctcatcaggtgcataacctctactcctgtatcaaggttgctgaggacttcgtgtctcccgagcacgtgaaacactgtttcagactgactcaggaattccgacatctgtccaacacccacactaaccatgaagacaaactccaggtgaagaacattatctatcacgcagtaaaggacgcggtcggaaccctgaaagctcatgagtctaaactggcaaggtcc

SEQ ID NO: 108 - DNA, 1425 bp, synthetic construct
  source 1..1425: mol_type = other DNA
gccaccatggcaacccaggctaagcgcccacgcgtggccggacctgtggatggcggagatctggaccccgttgcctgctttctttcctggtgtagaagggtgggtcttgagctgtcacccaaagtgagcgagcgcgccggtgggagacggactcgcggaggtgcaagagccgccctgacatccccgccagcccaggtggctgtctcccgacaggggacggtcgccgggtacggcatggtggcaagagagagcgtccaggctggggagttgctctttgttgtcccccgagctgccctgctctcccaacacacatgctccattggaggcctgctggagagagagagggtggcccttcagagccaaagtggatgggttcctctgctgcttgccctgctgcatgaactccaggcccccgcaagcaggtggcggccctatttcgccttgtggccagaactgggtaggctggagcaccctatgttttggccagaggaggagaggcgatgtctgctgcagggcacaggggtcccagaggctgtagagaaggatctcgccaacatcaggtccgagtaccaatcaattgtgctgcctttcatggaagcccaccccgacctcttttccctgagagtccgcagcctcgaactgtatcaccagctcgtggcgctcgtgatggcctatagtttccaggagcctctcgaagaagaggaggacgagaaggaacccaattcccctgtgatggtgcctgccgctgacatcctgaatcatctggctaaccataatgccaatcttgaatatagtgctaactgcctgcggatggtggccacccaacccatccccaagggacacgaaatattcaatacttacgggcaaatggccaactggcagctcatccatatgtacggcttcgtggagccttatcccgacaacaccgacgatacagctgacatccagatggtaactgtccgcgaggccgcgttgcaaggaaccaaaactgaagccgagaggcatctggtttacgaacggtgggacttcctgtgtaagctcgagatggtgggagaagagggagcctttgtcatcgggagagaggaagtgctgactgaggaggaactgacaaccacccttaaggtcctctgtatgcctgcagaggagtttagagagctgaaggatcaggacggaggcggcgatgacaaaagagaagaagggagtctgactatcactaacattcccaaactgaaggcatcttggaggcagcttctgcagaacagtgtgctgctgaccctgcagacgtacgcaacagacttgaagacagaccagggcctgctttcaaataaagaagtgtatgctaagttgagttggcgggagcaacaggctctgcaggtgcggtacggccagaaaatgattcttcatcagctgttggagctgacaagc

SEQ ID NO: 109 - DNA, 2463 bp, synthetic construct
  source 1..2463: mol_type = other DNA
gccaccatgagattttcttgggctcagggaacagataccatattggcagacgagatgggtttgggaaagaccattcagacaatagtgtttctctactccctctacaaggaagggcatacgaaaggtcctttcctcgtttctgcccctcttagcaccattatcaattgggagagggagttccaaatgtgggccccgaagttttacgtggtgacctacaccggagataaagatagtagggcaatcattcgagagaacgagttttcattcgaggacaacgccattaagggaggcaaaaaggcctttaagatgaaacgcgaggcccaggtcaagttccacgtgctcctgacttcatatgagctgatcaccatcgatcaggcggccctgggctccataaggtgggcgtgcctcgtagtggatgaggctcatcggctcaagaacaaccagtccaagttttttcgggtgctgaacggctataagatcgaccataagttgctgttgacaggaaccccattgcaaaataacctggaggaactctttcacctgctcaactttcttacccccgaaaggtttaataacctcgagggcttcctggaagagtttgcggatatctctaaggaagaccagattaagaagctgcacgacttgctgggcccgcatatgctgcgacggctgaaagctgatgtcttcaagaatatgccagccaagacagaattgattgtgcgcgtggaactgtcccctatgcagaagaagtattacaaatatatcctcacacgcaactttgaggctctcaactctcgaggaggggggaatcaagtttcacttctgaacataatgatggaccttaagaaatgctgcaatcacccatacctcttccctgtcgccgccatggaaagtccaaagcttccgtctggagcttacgaagggggcgctctgattaagagttctggcaagctgatgctgttgcagaagatgcttaggaaactcaaggagcaaggacatagagtcctgattttttctcagatgactaagatgctggatctgcttgaagactttctggattacgagggctataagtacgaacgcatagacggggggatcacaggcgcgttgagacaggaggcaatagatcggtttaacgcccccggcgcccagcaattctgttttctcctgtctacaagggccggggggctgggaataaacctggccaccgcggacacagtgatcatctttgactccgattggaacccacacaatgatatccaggcattttcccgcgcccataggatcggccaggctaataaagtcatgatataccggtttgtgaccagagcgtcagttgaggagcggatcactcaggtagctaaacgcaagatgatgctgacccacttggtggtaagacccggcctcggaagcaaggctggcagcatgagcaaacaagaactggacgatattctgaagttcggcacagaggagctcttcaaagatgagaacgaaggggagaataaggaagaagacagttctgtgatccactacgacaatgaagcaatcgctaggttgctcgaccggaatcaggacgccacggaggatactgacgtgcagaatatgaacgagtatcttagctctttcaaggtagctcaatatgttgtccgggaagaggataagattgaggaaatcgagcgggaaataattaagcaggaggagaacgtggatcccgattattgggaaaaacttctgcggcatcactacgaacagcagcaggaggatctggctagaaatctggggaaggggaagagagtccgaaaacaggtaaattacaatgacgccgctcaagaggatcaagacaaccaatctgaatactcagtcggctccgaagaagaggacgaagatttcgatgaaaggcctgagggcaggcggcagtccaaacggcagctcaggaatgaaaaggacaaacccctgccacccctgctggcaagagttggagggaacatcgaggtgctcggattcaatacccggcagcgaaaagcctttctgaatgcagtcatgcggtgggggatgccacctcaggatgctttcactactcaatggctggtgagagacctgaggggaaaaacagagaaagagttcaaggcctatgtatcactgttcatgaggcatctgtgcgaacctggcgcagacggctcagagacctttgccgatggcgtaccacgcgaaggactctcaagacagcaggtgctcacgaggattggggtgatgagcctggtgaagaagaaggtgcaggaattcgagcatattaatggacgctggagtatgccagaactgatgccagacccgtccgcggactcaaaaagaagcagccgcgcttcaagtcctactaaaacttcccctacaacccctgaagctagcgcaacaaattcaccctgtaccagcaaaccagcgacccctgctccaagcgaaaagggggag

SEQ ID NO: 110 - DNA, 1314 bp, synthetic construct
  source 1..1314: mol_type = other DNA
gccaccatgggaattcgaacaccgctggagaaggaagaggctgagaaccaggaggagaaaccagagaaaaacagtagaattggtgaaaaaatggagacagaggcagatgccccatcacctgctcctagccttggggagcgactggagcccaggaaaattcccctggaagacgaggtcccaggcgtgccaggggagatggaaccagagcccggttaccgcggcgacagagagaagagcgcgaccgagtccacccccggcgagcggggagaagagaaaccactggatgggcaggagcacagagagagacccgaaggcgagacgggcgacctggggaaaagagaagacgtcaagggggaccgcgagcttcggccaggcccaagggatgagccacggtcaaatggtaggagggaggaaaagaccgagaagcctcggtttatgtttaacattgcagatggagggttcaccgaactgcataccctgtggcaaaacgaggagagagccgccattagctccggaaagctcaacgagatctggcataggaggcacgactattggttgttggctgggattgtcctgcacgggtacgctagatggcaagacattcaaaatgacgcacagttcgcaataattaatgagccattcaagaccgaggctaacaaaggaaattttctggaaatgaagaataaattcctcgccagaagatttaagctgctcgagcaggcacttgtaatcgaggagcagctccgcagagcagcttacctgaacctgtcacaggaacctgctcatccggctatggcattgcatgcaagattcgctgaggccgagtgcctggctgaaagtcaccaacatctcagtaaagaatctctggctggaaataagccagcaaatgctgtcctgcataaagtgctgaatcagctggaggaactgttgtccgatatgaaggctgacgtgacccgactgcccgctaccctcagtaggatcccccccatagctgctcggctccagatgtccgagagatctattttgagtagacttgcgtcaaagggtacagagccccatccaacccccgcttatccacctggcccatacgccacgcctcccggctatggggcggcgttcagcgccgccccagtaggtgcgctggcggccgctggcgctaactattcccaaatgcccgcaggcagcttcatcaccgcggctacaaacggacccccagtgctggtgaagaaagagaaggagatggttggcgcactggtaagtgacgggttggatagaaaggagcccagggccggcgaagtgatatgcattgacgac

SEQ ID NO: 111 - DNA, 501 bp, synthetic construct
  source 1..501: mol_type = other DNA
gccaccatgctgagcaagttgagtatccaggacaataacgtggatctgatcctcgcaacccctcccttctctaggctggagaaactttattctactatggtccggttcctttctgaccgcaaaaatccggtttgtcgggagatggcagtcgtgcttctggcaaatctggcccagggtgacagcctcgcagcacgcgccattgcggtccaaaaaggatccataggcaatctgttggggtttcttgaggattctctggcagcgacccagttccagcagtcccaggcgagcctcctgcatatgcagaatcctcctttcgaacccacctccgtggacatgatgcgccgcgcagccagagccctcttggccctcgccaaagtcgatgaaaaccattcagagttcactttgtatgaatcacgcttgctggacatcagtgtgagtccactgatgaatagcctggtctcacaggttatctgcgatgtactgtttctcattggccagagt

SEQ ID NO: 112 - DNA, 582 bp, synthetic construct
  source 1..582: mol_type = other DNA
gccaccatggctgcacagattcccatcgtcgctaccacctccacacctgggattgtacggaacagcaagaaacgacccgcctccccgagccacaacgggtctagtggcggtggctatggagctagcaagaagaagaaggcctcagcttcttcctttgcccaaggaattagcatggaagccatgagcgagaacaagatggtgcctagtgaattttccaccgggcccgtggagaaagcagctaaaccgcttcctttcaaggatcccaattttgtgcactctggccatggcggtgctgttgccgggaagaaaaaccgaacttggaagaacttgaagcagatcctggccagtgagagggccctgccttggcagctgaatgatcctaactacttcagtattgatgccccaccttccttcaaacccgccaagaagtacagtgacgtgtccggtcttcttgcaaattacaccgacccccagtctaagctccgcttttccaccattgaggaattctcatacattagaagattgccgagtgacgtggtgaccggctacctcgccctgagaaaggctacatctatcgttcca

SEQ ID NO: 113 - DNA, 1377 bp, synthetic construct
  source 1..1377: mol_type = other DNA
gccaccatgggcccgggctgcgatctgctgcttagaaccgccgcgactataacagcagccgctatcatgtccgatactgactccgacgaagattcagctggtggtgggccgttctctttggctgggttcctgtttggcaatattaacggcgctggtcaactggagggggaatccgtgttggacgatgaatgcaagaagcacctcgcagggctgggcgcccttggcctgggttccctcataacggagctcacagctaatgaggagcttaccggtacagacggggctttggttaatgacgagggctgggtccgcagcacagaggatgcagtcgattactccgacatcaacgaagtggccgaggatgaatccagacggtatcaacagacaatgggaagtctccagccgctctgccatagtgattatgacgaagacgactacgatgccgattgtgaagacatcgactgtaaattgatgccaccccctccccctccgccaggtcccatgaagaaagacaaggaccaggactcaattactggggagaaggtggatttctccagtagttcagacagtgagtccgagatgggcccacaggaggccacgcaggctgagagtgaggacggcaaactcactctgcccctggccgggatcatgcagcacgacgctaccaaactccttcctagcgtcactgagctcttcccagaattccgccccggaaaggtgctccgctttttgcgcctctttggacctggaaagaatgtcccctcagtttggcgaagcgctagacgcaagcgcaaaaagaagcatcgcgaattgatacaagaagagcagattcaggaggtcgagtgcagcgtcgaaagcgaggtcagtcagaaatccctctggaactacgactacgctccgccacccccacccgaacaatgcttgagtgacgatgagattaccatgatggcacccgtggaatcaaagttcagtcagtctaccggggatatcgataaggttactgatacaaagccaagagtcgctgaatggaggtacggtccagcccggctctggtatgatatgctcggggttccagaggatggaagcgggtttgactacgggtttaagcttcgcaagacagaacacgagccggtcattaaatctcgaatgatcgaagaattccgcaagttggaggagaataatggaaccgacctgctggctgacgaaaacttcctgatggtaacacaactgcactgggaggatgacattatctgggacggcgaggatgtgaagcacaaaggtacgaaaccgcaaagagcaagccttgccggatggcttccttcttctatgacaagaaatgccatggcctataatgttcaacagggcttcgcggcaacc

SEQ ID NO: 114 - DNA, 1695 bp, synthetic construct
  source 1..1695: mol_type = other DNA
gccaccatgctggacgatgataaaccctggtatagtattttccccatcgataacgaggatttggtgtacggcagatgggaagataacattatttgggacgctcaggccatgccccggctgcttgaacctcctgtgctcacactggaccccaacgatgaaaaccttatcctggaaattccagatgagaaggaagaggctactagcaattccccaagcaaagaatccaagaaggaaagtagcctgaaaaaaagcagaatcctgcttggaaagaccggcgtgattaaggaggagccccagcagaacatgtctcagcccgaggttaaggatccctggaacctgagcaatgatgaatactactaccccaagcagcaagggctccggggaacttttggaggtaacattattcagcatagtatccccgcagtggaacttcggcaaccgttctttcctacacacatgggtcctatcaaacttcggcaatttcatagaccccccctgaagaagtatagttttggtgcactgtcccagccagggccccactctgtccagcccctgctgaaacacatcaagaagaaagctaagatgagggagcaggagcggcaagcgtccggcgggggggagatgttcttcatgcgaaccccccaggacctgacaggcaaggacggggatttgatactggcagaatatagtgaggaaaatggaccactgatgatgcaggttgggatggctaccaagattaagaactattacaagaggaagccaggaaaggaccccggcgcacccgattgtaaatacggagagacggtatactgccacaccagtccattcctgggtagcctccaccccggccagctccttcaggccttcgaaaacaacttgtttagggcccctatctatttgcataagatgccagagacagatttcttgattatccgcactagacaggggtattatatacgggagctcgtggacatcttcgtcgtggggcagcagtgcccactgttcgaggtgcccggtcccaatagtaagcgagccaatactcacatcagggactttctgcaggtgtttatctataggctcttttggaaaagcaaagatcgacctcgacggattcggatggaggacatcaagaaagcatttcctagccactcagagtcatccatcaggaagaggctgaagctctgtgcagactttaagcgaactggcatggattccaactggtgggtgctgaagtcagactttagacttcctactgaagaggagatccgagccatggtgagccctgaacagtgctgcgcctactatagcatgatcgccgcagaacagcggcttaaggacgcaggatacggcgagaaatcatttttcgctcctgaagaggaaaacgaagaagattttcagatgaagattgatgatgaagtacgcaccgccccttggaacaccacaagggccttcatagccgccatgaaaggtaaatgcttgctggaggtgaccggggtggcagaccccacggggtgcggcgaagggttttcctacgtcaaaatcccaaataaacctactcagcagaaagacgacaaggagccgcagccggtgaagaagaccgtaacaggaactgatgccgacctccgcagattgtccctgaaaaacgccaagcaacttctccgaaagtttggcgtgccagaggaggagatcaaaaag

SEQ ID NO: 115 - DNA, 1602 bp, synthetic construct
  source 1..1602: mol_type = other DNA
gccaccatggtccttaagttccccaaacagcagctccctccgaaaaagaagcgccgcgttgggaccacggtgcattgcgactaccttaacagaccacacaagagtatacaccgccgccgcacagatcccatggtcacactcagttccatcctcgaatccattatcaacgatatgcgggatctgcccaacacgtacccattccatacaccggtgaatgcaaaagtagtcaaggattattataagatcattactagacctatggacctgcagactttgcgggaaaacgtgaggaagcggctctacccaagccgggaggaattcagagagcatctggagctgatcgtgaaaaattctgcaacttataatggcccaaagcatagtctgactcagatcagccagagtatgctggatctgtgcgatgagaagctgaaggagaaggaggataagttggccagactggagaaagctattaatcctctcttggacgatgacgatcaggtggcattttctttcatattggataacatcgtaacacagaaaatgatggccgtaccagattcatggccttttcatcatcccgtgaataaaaaattcgtacctgattattacaaggtgattgttaacccaatggatctcgagaccatccgaaaaaacatcagcaaacacaaatatcagtcaagggagtcttttcttgacgatgtcaacctcattctggccaactctgtgaaatataatggccctgagagtcagtacacgaagactgctcaagaaatcgttaacgtctgctaccagactctgacggagtatgatgagcatctcacgcagctcgagaaggatatctgcactgcgaaagaggcagctctggaggaggcagagctggagagtctggacccaatgacaccaggaccatatacaccccagccccccgacctgtatgacactaacacgtcccttagtatgtcacgagacgcaagcgtgttccaggatgaaagcaacatgtcagtgctggacattcctagcgcgaccccggaaaagcaagtgactcaagaaggagaggacggagacggtgatttggccgatgaagaggaaggaacagtgcagcagccacaggcgtctgtgctgtacgaggacctgcttatgtccgagggagaggacgacgaggaagatgcagggagcgacgaagagggggataacccttttagcgccatacagctttcagaaagcggctcagacagtgacgtgggttctggggggattaggcccaagcaaccacgaatgctgcaggagaacactcggatggacatggaaaacgaggagagtatgatgagttacgagggggacgggggagaggcctcccatggattggaggattccaatatcagttatgggagctacgaggagccagacccaaagtcaaatacgcaagataccagtttttccagtatcggcgggtatgaggtgagcgaagaggaagaagatgaggaggaggaggaacaacgctcaggcccgtccgtgctctcccaggtgcatctctctgaagacgaggaagatagtgaggattttcatagcattgctggtgatagcgatctggacagcgacgag

SEQ ID NO: 116 - DNA, 1431 bp, synthetic construct
  source 1..1431: mol_type = other DNA
gccaccatgcctaagctgaaggccaagcctattcgcaccgcttccggtatagctgtggtagctgttatgtgcaagccccacaggtgcccccacattagcttcactgggaacatctgtgtttactgcccaggtggccccgattccgattttgagtattccacccaatcctacacaggatacgaacccacatccatgcgggctatcagagctagatacgacccctttctgcaaactagacacaggatcgaacagctcaagcaactgggacacagtgtggataaagtggaattcatcgtgatgggcggaacctttatggctcttccagaggaatatcgagattacttcattcgaaacctccacgatgccctgagcgggcatacaagtaacaatatatatgaagccgtaaagtatagcgagcgctcattgacaaagtgtattggcataactattgaaacccggcccgactattgtatgaagagacacctcagtgatatgctgacatacggctgcactagactggagatcggggtgcaatctgtttatgaggacgttgctcgggataccaatcgaggacacactgtcaaggcggtctgtgaatcattccatctcgccaaggacagtggcttcaaagttgttgcgcatatgatgccagatctgcccaatgtcggattggagcgcgacattgagcaattcacagagttttttgagaatccagccttccgacccgacgggctgaagctgtatccaaccctggtcattagaggcacagggctgtacgaactctggaagagtggaaggtataaatcctactctccatccgacttggtggaactggtggctagaatcctggctcttgtgccaccttggactcgcgtgtatagagtgcagagggacatcccaatgcccttggtgagcagtggcgtagaacacggcaaccttagggagcttgcgctggctcgcatgaaggatcttggaatacagtgcagggacgttcgcacaagagaggtgggcattcaagagatccaccacaaagtgcgcccgtaccaggtagagctggtgcggagagactacgtagctaatggcggatgggaaactttcctctcatacgaagaccccgatcaggacatcctcatcggcctgctgcgcctgagaaaatgtagtgaggaaacattcagatttgaattgggcggtggggtttcaatcgtgcgcgaactccacgtttacggtagcgtagtgcctgtctctagtagggatcccaccaagtttcagcatcagggtttcggaatgctccttatggaggaagcagaaagaatcgcacgggaggagcatggatcaggaaagatcgctgttatttccggcgttggcacgcgaaactattacagaaaaattggatatagactgcaaggcccctacatggttaagatgctgaaa

SEQ ID NO: 117 - DNA, 438 bp, synthetic construct
  source 1..438: mol_type = other DNA
gccaccatgagagcccatcctggcggaggtagatgttgcccagaacaggaagagggggaaagcgccgccggtggcagcggcgctggaggagattccgccatcgaacagggcggtcagggatcagcgctggccccttctcccgtgtctggagttcggcgagaaggcgccagggggggtggtagaggacgcggcaggtggaagcaggcaggccgcggaggcggggtctgcggaaggggtcgaggccgaggcaggggacgcggcaggggtaggggtcgcggcagaggaagaggacgcccaccaagcggtggaagcggactgggaggcgatggcggaggctgcggcggagggggtagcgggggagggggagcccctcgaagggagcccgtgccatttcccagcggatccgctggcccaggacccagaggtcctcgcgccact

SEQ ID NO: 118 - DNA, 600 bp, synthetic construct
  source 1..600: mol_type = other DNA
gccaccatgcctagcaagcttcagaagaacaagcaacgcttgcgcaatgaccctctgaatcagaacaagggcaagccagatctcaacactaccctcccaattcgccagaccgccagtatttttaagcaaccagtgactaaggtgactaatcacccctctaacaaagttaagagcgacccgcagaggatgaacgagcagcccaggcagctgttttgggagaaacggcttcagggactctctgctagcgacgttacagaacaaatcatcaagacaatggaacttccgaaaggcttgcaaggcgttggtcccggttcaaacgatgagacactgctgtccgccgtggcaagcgcgttgcatactagtagtgcccccatcacaggtcaggtttccgccgcagtagagaagaatcccgccgtgtggctcaacacctctcagccactgtgcaaagcatttatcgtgactgacgaagatatcaggaagcaggaagagcgcgtgcaacaggtgcgaaagaagttggaggaggcacttatggccgatatcctgtcccgcgcagccgacaccgaagaaatggatattgagatggacagtggcgatgaagcg

SEQ ID NO: 119 - DNA, 642 bp, synthetic construct
  source 1..642: mol_type = other DNA
gccaccatggtcaagcttgccaaccccttgtacactgagtggatcctggaagccatccagaagatcaagaagcagaaacagcggccaagcgaggagcgaatctgccatgctgtgagcacgagtcatggtctggataagaaaacagtgtccgagcaacttgaattgtcagtgcaagacggtagcgtactgaaagtgacaaataaaggtttggcttcttataaagacccagataatccgggccgcttctccagcgtaaaacctggaactttcccaaaatctgccaaaggtagccggggtagctgtaacgacctccggaacgtggattggaataagctgcttagacgggccattgaaggtctggaggagcccaatggttcatccttgaagaatatcgaaaaatacctgcggagtcagtcagaccttaccagtaccacgaataatccggcctttcagcaacgcctgagactgggcgccaaaagagccgtcaataacgggagactgctgaaagacggcccccagtaccgcgtgaactatggctcacttgacggcaagggtgcgcctcagtatccatcagcgtttccgagcagtctgcctcccgtctctctgctgcctcacgaaaaggatcagccccgagcggatcca

SEQ ID NO: 120 - DNA, 1200 bp, synthetic construct
  source 1..1200: mol_type = other DNA
gccaccatgaagaaaggaagaaaattgctgcatgagaaagccgcgcaaatcaaacgcagatatgccaagcccatcgggcgacctaagaataaacttaagcaaaggctgttgagtgtcacctccgatgagggctccatgaacgcttttaccggacgggggtcaccaggccgaggtcagaagaccaaagtatgtacgactcccagttcaggacatgcagcatctggaaaggactccagtagtcgcctggctgtgaccgaccctacgaggcctggcgctaccacgaaaatcactactacatccacatacatctctgcctcaacacttaaggttaataagaaaaccaaaggcctgattgatgggcttactaaattttttacgcccagccccgatggaaggcggtctcggggagaaattattgacttttctaagcattacagaccaaggaaaaaagtatctcagaagcagagctgtaccagccatgtgctggccacaggcaccactcaaaagctgaagcctcctccgagctctctgccaccacccactcctataagcgggcaaagccctagcagccagaagtcctccaccgctacctcctcccctagcccacagtctagtagttcccagtgctcagttcccagcctgagttcactgaccaccaattctcagctgaaggcattgtttgacggtctgagtcacatctataccacccagggtcagtcacggaagaagggacacccttcatacgcaccacccaaaagaatgagaagaaaaacagaactgagctcaaccgccaagtctaaggcacacttctttggaaaacgcgatatacggtcacggttcatctcccattcttcctccagcagctggggtatggcacggggatcaatcttcaaggccatcgcacatttcaagcggactacctttctgaagaagcaccgcatgctgggcagattgaaatacaaagtgacaccacagatggggactccctctcccgggaaaggcagcctgacagatggcagaataaaacccgaccaggacgacgatacggagatcaagatcaatattaagcaggagtcagctgatgtgaacgtgatcggaaataaagacgtggtaactgaggaggatctggacgtttttaagcaagctcaggaactctcctgggaaaaaatcgagtgcgagtccggcgttgaggattgcggg

SEQ ID NO: 121 - DNA, 1284 bp, synthetic construct
  source 1..1284: mol_type = other DNA
gccaccatggattgtggccgctatccgtccgtgattgaatttggaaagtatgagattcagacttggtactcttccccatatccacaggaatacgcaagacttccaaagctttatctctgtgaattctgcctgaagtatatgaagtctaaaaatatactgttgaggcattccaaaaaatgtgggtggttccacccaccagctaatgaaatctatcgcaggaaagatctttctgtgtttgaggttgacgggaatatgagtaagatctactgccagaacctctgccttctggccaagctttttttggaccacaagaccctctactacgacgtggaaccattcctgttctatgtgctcaccaaaaatgacgagaagggctgccatcttgtgggatatttctctaaagaaaaactttgtcaacagaagtacaacgtctcatgtattatgataatgcctcagcaccaacgccagggtttcggacggtttctgatcgacttttcttatctgctgagtcgacgagagggacaagccggctcacctgaaaaacctttgtctgacttgggtagactgtcctacctcgcatattggaaatcagtgattctcgaatacctgtatcaccaccacgaacgccacatctcaattaaagctatatccagagccactgggatgtgcccacacgacattgctaccactctccagcatctgcacatgatagacaaaagggacggccggtttgtgatcatacgacgagagaagctgattctgtctcacatggagaagctgaaaacatgttccagagccaatgagctggaccctgacagtctgagatggactccgattctcatcagcaatgcagcggtctctgaggaggagcgggaggctgagaaggaagccgaacgactcatggagcaggcttcttgttgggaaaaggaggagcaggaaatcctttccaccagggccaactcccggcagtctccagcaaaggtacaatcaaagaacaaatacctccacagtccagagtcccgacctgtgacaggagagcgaggacagctgctcgagctgtctaaggagagtagtgaggaggaggaagaggaagaagacgaggaggaagaagaagaggaagaggaggaagaagaggacgaggaggaagaggaggaggaggaagaagaggaggaggaggagaacattcaatcctctccccccaggctcaccaagcctcagagtgtagccataaaacggaaaaggccattcgtgcttaaaaagaagcgggggcgcaaacggagaaga

SEQ ID NO: 122 - DNA, 2805 bp, synthetic construct
  source 1..2805: mol_type = other DNA
gccaccatgtctagtgttactactgaaaccatatctgagactacggaggtgctcaatgagccttttgacaatagcgacgaggaacgacctatgccacagctggagcccacatgcgagatcgaggtagaggaagacggccgaaaacccgtactgaggaaagcattccagcatcaacccggtaaaaagagacaaacggaggaagaggagggaaaagacaatcattgcttcaaaaacgcagacccttgcaggaataacatgaacgatgacagcagtaaccttaaggaaggatcaaaagacaatcccgaaccgctcaagtgcaaacaggtgtggcctaaaggaacgaagcgcggcctctccaagtggcgacagaataaggagaggaaaaccgggttcaagctgaatctgtatacaccaccggagacaccaatggagcctgatgaacaggttaccgtggaggagcagaaggagacgagtgagggcaagacttcaccctctcctattcgcatcgaagaagaagttaaagaaacaggggaagccctcttgcctcaggaagagaataggcgggaggagacctgtgcccctgtcagccccaacaccagccccggcgagaagcccgaggacgacctgattaaacctgaggaggaggaagaggaagaggaggaggaagaagaggaagaagaagaggaggaaggcgaagaggaggagggcggaggtaacgtggaaaaagacccggacggtgccaagagtcaggagaaggaggaacctgagattagcacagaaaaagaagacagtgcccgacttgacgaccatgaagaggaggaagaggaggacgaagagccttcacacaacgaagatcacgatgcagacgacgaagacgattcccatatggaaagtgccgaagtagagaaggaggaactgccaagagagtcatttaaggaggttctcgagaatcaggagaccttcttggatctgaacgtccagcccgggcattcaaaccctgaagtgctgatggactgtggtgtcgacctgactgcctcctgcaatagcgagcccaaggagctggccggagaccccgaggcagtgcctgagtccgatgaggagccgccaccgggcgagcaggcccagaagcaggaccaaaagaactccaaggaggtggatactgagttcaaggaaggaaaccctgccacgatggaaatcgattccgagaccgtccaggccgttcagagcctgacacaagaatcctctgaacaggacgatactttccaggactgcgctgagacccaggaagcatgtagaagcctccaaaactatactcgagccgatcagagtccacagatcgcaacgacactggacgattgtcaacaaagcgaccactctagcccggtgtcaagcgtgcactcccatccaggccagtccgtcaggagcgtgaacagcccatctgtccccgcactggaaaattcctatgcccagatttctccagaccaatccgctatttctgtcccatcactgcagaacatggaaacctcccccatgatggatgttcccagtgtgtctgaccatagccaacaagtggtggactccgggttctctgacctgggatctattgaatccaccacggagaactatgagaatccctcctcctatgattccaccatgggtggatccatctgcggtaacggaagcagccagaattcctgcagctatagcaatctcacatcctctagcctcacacaaagcagctgtgcagtgacacagcagatgtctaacattagcgggagttgcagtatgctccagcagacaagtatctcatcacccccaacttgctccgtgaaaagtccccaaggatgcgttgtggaacgccctccgtccagttctcagcagcttgctcagtgctccatggccgcaaatttcactccccctatgcagttggcagaaataccagaaacctcaaatgcgaatatcggcctctatgagagaatgggacagtcagacttcggagctggacattatccgcagccatctgctacattttcattggcaaagctccaacaactgacaaacaccctcattgatcacagcctcccttatagccactcagctgccgtcacatcttacgccaactccgcctcattgtcaacaccgctcagcaacaccggactggtccaactttctcaatctcctcatagcgtacctggcggccctcaggcccaggcaacgatgaccccaccccctaatctgacgccaccacccatgaatctcccgcccccgctcctgcaaaggaacatggccgcttcaaatatcggcatctcccactctcagcgactgcaaacgcagattgccagtaagggtcacattagtatgagaaccaagagcgcgagtttgtcaccagcagccgctacacatcaaagccagatatacggaaggagtcagacagtagcaatgcaaggtccagcgaggacacttaccatgcagcgcgggatgaacatgtcagtcaacctgatgcctgcccctgcctataacgtgaactcagtgaacatgaacatgaacactctgaacgccatgaacgggtacagtatgagccagccaatgatgaattccggttaccacagtaaccacgggtacatgaatcaaactccacagtacccaatgcagatgcagatgggcatgatgggcacgcagccgtatgctcaacagcccatgcagactccaccacatggaaatatgatgtacacagctccggggcaccacggctacatgaataccggaatgtctaagcaaagtctgaacggctcttacatgcggcgc

SEQ ID NO: 123 - DNA, 1395 bp, synthetic construct
  source 1..1395: mol_type = other DNA
gccaccatgagggctgggcctgagccgcaagctctggccggacagaagcgaggggccctgcgactgctggtaccaagactggtcttgactgtgagcgcacctgctgaggtgcggcggagagttcttcgacccgtgctcagttggatggacagagaaacccgagctttggccgattctcactttcgcggcctgggagtagacgttcccggggttggacaagctcctggacgcgtggccttcgtgagcgagccgggtgccttttcctacgcagatttcgtgcggggttttcttcttcctaatcttccctgcgtgtttagtagcgctttcactcaaggttggggttctcgacggaggtgggtgacaccggcagggcgacccgacttcgatcacctgttgcgaacttacggcgacgtggtggtccccgtggcgaactgtggagttcaagagtacaacagcaaccccaaggaacatatgacgctgcgagactatattacttattggaaagagtacattcaggcgggctattcctctccgagaggttgtctgtatctgaaggactggcacctgtgcagagattttcccgtggaggatgtattcaccctgcctgtgtatttcagctccgattggcttaacgaattctgggacgccctcgatgtggacgactatagattcgtgtacgccggtcccgcaggctcatggtctcctttccatgctgatatatttagaagtttttcatggagcgtgaatgtttgtggtaggaaaaagtggctcctttttcctcctggccaggaggaggcactccgggacaggcacggcaacctcccgtacgatgtgaccagtcctgcgctttgtgatacacacttgcaccctaggaaccagctggccggtcccccactggaaataacacaagaggccggagagatggtcttcgtgcccagcggatggcatcaccaggtgcacaacctggacgacacaatctccattaatcacaattgggtaaatgggttcaaccttgcaaacatgtggagatttctgcagcaagaactctgcgcagtacaggaggaagttagtgagtggcgggacagcatgcctgactggcaccaccactgtcaagtcatcatgcgaagttgttccggaatcaattttgaagaattttatcacttcctgaaggtaatcgccgagaaacgcctcctggtgttgcgggaagccgctgctgaggacggcgccggacttggattcgaacaagccgcattcgatgtcggtcgcatcactgaagtgctggcaagtctggttgcgcatcctgatttccaacgggtagacaccagtgctttttctccacagccaaaggagttgctgcagcagctccgggaggctgttgacgccgccgcagcacct

SEQ ID NO: 124 - DNA, 255 bp, synthetic construct
  source 1..255: mol_type = other DNA
gccaccatggctggcgtgggccccggaggctatgccgctgagtttgtgcctcccccagaatgtcccgtgtttgagccatcttgggaagagtttacagacccactctcttttattggcaggatcaggccactggctgaaaaaactggcatttgtaagattagacccccaaaggattggcagcctcctttcgcctgcgaagtaaagtccttccgcttcaccccacgagtccagcgactcaatgagttggaggccatg

SEQ ID NO: 125 - DNA, 1005 bp, synthetic construct
  source 1..1005: mol_type = other DNA
gccaccatggagtgttcaaagccccgcgaggccttcggatttgaacaggctgtgagggagtacacgcttcagagttttggtgaaatggccgataattttaaaagcgactactttaacatgcctgttcacatggtgcctactgagctggtggagaaggaattctggcgcctggtcagcagcattgaagaggatgtgatcgttgagtacggagccgacatcagctcaaaggacttcggctccggttttcccgtcaaggacggccgccggaaaatcttgcctgaggaggaagaatacgccctgtcagggtggaatctgaacaatatgcccgtcttggagcaatctgttttggcacatatcaatgtggatataagtggtatgaaagtaccctggctgtacgtagggatgtgtttttccagcttctgctggcacattgaggatcactggagctattccataaattacctgcattggggcgaacctaagacctggtatggtgtgcctagccatgccgctgagcagctggaggaggtcatgcgcgagctcgctcctgaactgtttgaatctcagccagacctcctgcatcagttggtcacaataatgaaccccaatgtcttgatggagcacggagtgcccgtatataggacaaaccaatgcgctggggaatttgtggtgaccttccccagagcttatcatagcggcttcaaccagggttataattttgccgaggccgtaaatttttgtacagccgattggttgccaatcgggcgacagtgcgtgaaccactatagaagattgcgccgccattgcgtgttcagccacgaggagctgattttcaagatggccgccgatcctgagtgtctggatgtgggacttgccgcaatggtgtgtaaggaactgactctgatgacagaggaggaaacccgcctgcgcgaatctgttgtccagatgggtgttctgatgagtgaagaggaggtgttcgagctcgtccctgatgatgaacgccag

SEQ ID NO: 126 - DNA, 1305 bp, synthetic construct
  source 1..1305: mol_type = other DNA
gccaccatgctttacggcgtgaaggtgcgagcccagagctatgatacttgggtgtcacgggtgaccgaagccctttccgccaattttaatcacaagaaagatctgattgagcttcgggtgatgctggaggacgccgaggacagaaaataccctgagaacgacctctttaggaaactgagagatgccgtcaaggaagctgagacatgtgcatctgttgcccagctgctgctgtctaagaagcagaaacatcggcagtcccctgattctggaagaaccagaacaaaactgaccgtggaggaactgaaggctttcgtccagcagttgttctccctcccatgcgtaatcagccaggccagacaggttaagaacttgctggacgacgtggaagagtttcacgagcgggcccaggaggctatgatggatgaaacgcccgactcttctaagctccaaatgctgatcgacatgggatctagcttgtacgttgaactgcccgaactgcccagactcaagcaggagctccagcaggctaggtggctggacgaggttcgcctgacactgagtgatccccaacaggtcaccttggacgttatgaagaaattgatcgattctggggtgggccttgcccctcaccatgccgttgaaaaagcaatggccgagctgcaggagctgctcaccgtgagtgaaagatgggaggagaaagccaaggtgtgtctgcaggccaggcctaggcatagcgtggcatccctggaatccatcgtgaacgaggcaaagaatatccccgcctttctcccaaatgttctctctctgaaagaagctctgcagaaagccagggaatggacggctaaggtggaggccattcagtcaggcagtaattacgcatacttggagcagctggaaagtctttcagcaaaggggcgacctattccagtgcggctggaagccctcccgcaagtggaaagccaggtggcggccgctcgggcctggagagagagaactgggagaacctttcttaagaagaactccagccacacactcctgcaagtactgtccccccggactgacatcggggtgtacggcagcggcaaaaatcgaaggaagaaagttaaggagctcattgagaaagagaaagagaaggacctcgatctggagcccctgtcagacctcgaggagggcctggaggagactagagacactgccatggtcgtggccgtgtttaaagaaagggagcagaaagaaattgaagccatgcactcactccgcgccgctaatcttgcaaagatgaccatggtggataggatcgaggag

SEQ ID NO: 127 - DNA, 1173 bp, synthetic construct
  source 1..1173: mol_type = other DNA
gccaccatgcgcaggcctagactggagaccatactctcccttctcgtcagtctccagaaactgccagtgcgactgccagagggggaagctcttcaatgcctcacagagcgagctatgtcctggcaggatcgcgcccgacaagccctggcaactgacgaactctcctccgctttggctaagctctccgtcctgagtcagcgaatggtcgaacaggctgctcgcgaaaaaaccgaaaaaataattagtgcagagcttcaaaaagcggctgccaatcccgacttgcaaggccatctccccagtttccagcagagcgcatttaaccgggtggtgagctccgttagctcttccccccgccaaacaatggattacgatgacgaggaaacagactcagatgaggacatcagagagacttatggttatgatatgaaagatactgcctccgtgaagtcatcttcctccctggagcctaatcttttctgcgatgaagagatacccatcaagtctgaagaggtcgtgacacacatgtggaccgctcctagtttctgtgctgaacatgcctatagctcagcctctaaaagttgttcacaggggtcaagtactcctcggaagcagcctcggaaatcacctctcgttccacgcagcctggagccacccgtgctggagctgtcacccggcgctaaggcacagctggaggagctgatgatggtgggagacttgctcgaggtctcactcgatgagacccagcacatctggcgcattctccaggctactcaccccccatctgaggatagatttctgcatatcatggaagacgacagcatggaagaaaagcccttgaaggtgaaagggaaggactcctccgagaagaaaaggaagagaaagctcgagaaagttgagcagctgttcggcgaaggtaaacagaagagcaaagagctgaaaaagatggacaaaccacggaagaagaaattgaaacttggcgcagacaaatcaaaggaactgaacaaacttgccaagaaactggctaaagaggaagaacggaagaagaaaaaggagaaggccgcagccgccaaggtagagctcgtgaaagagtccacggaaaaaaagagggagaaaaaagtcctggacatcccttctaagtatgactggagcggggcagaggagagtgacgatgag

SEQ ID NO: 128 - DNA, 3090 bp, synthetic construct
  source 1..3090: mol_type = other DNA
gccaccatgaacagtcccaatgagagtgatgggatgagtggtcgggaaccaagtctggagattttgcctaggacctccctgcattcaatcccggtgactgtcgaagtaaagcccgttcttcctagggcaatgcctagttctatggggggagggggcggtggcagccctagccccgttgagctgcggggggctctcgttggcagcgttgaccccaccttgagagaacaacagctgcagcaggaattgctcgcgctgaaacagcagcagcagctgcagaagcaactccttttcgcggaattccaaaagcaacacgaccaccttacgcggcagcacgaagttcagctgcagaaacacctcaaacagcagcaggagatgctcgccgcaaagcagcaacaggagatgctggccgcgaagagacagcaggagctcgaacagcagcggcagcgcgagcagcagaggcaagaggaactcgaaaaacagagactggaacagcagctcttgatcctgcgcaacaaggaaaagagcaaggagagtgctattgcctcaaccgaggtcaagttgcggcttcaggaattcttgctgtctaagagtaaggagcctacccccggtggcctcaatcattccctcccccagcatcccaagtgctggggtgctcaccacgcaagcttggaccagtcttctcctccgcagtcaggtcctcccggcacaccaccctcttataagctgccgctccctggtccatatgatagtcgggatgactttccattgagaaaaaccgccagcgaaccaaatctgaaagtgcgctctcgcttgaaacagaaagtcgctgagaggagaagctctcctttgcttcgacgaaaagacggtactgtgatctctaccttcaagaagagagctgtggaaattacgggggccggccccggagcgagctccgtctgtaatagcgcaccgggcagcggaccaagctccccaaattcaagtcactccacgattgcggaaaatggatttactggcagtgttccaaacattcccacagagatgctgccccagcacagagcccttccgcttgacagttcaccgaaccagttcagtctgtacacaagtcccagcctgcccaacataagcctggggctccaagcgactgttactgtcaccaattcacacctgaccgccagccctaaactgtccactcagcaggaggcggagcgacaggctctgcagtccctgcgacaggggggaactctgacaggaaagttcatgtccacatctagtatcccaggttgcctgctcggcgtagcgcttgagggagacggctctccccacgggcacgcatccttgcttcagcatgtcctgctgttggagcaggcccgacagcagagcacattgatagctgtcccattgcacggccaaagccctctggtgacaggcgagagggtggccacctccatgcgaaccgtagggaagctgcctcggcaccgccccctgtcaaggacacaaagctctcccctgccccagagcccccaggccttgcagcaactggtcatgcaacaacagcaccaacaattcttggagaagcagaaacagcagcaattgcagcttggaaaaatcctgaccaagacaggcgaactgccacgacagcccaccacgcaccccgaggagaccgaagaggaacttactgaacagcaagaagtgctgctcggcgagggtgcccttaccatgcccagagaggggagcactgaatctgagagcactcaagaggatctcgaagaggaggacgaagaggatgacggagaagaggaggaagactgtattcaagttaaggacgaggaaggcgagtccggcgcagaggagggacctgatctcgaagagccgggtgccggttacaagaaactgttcagcgacgcacagcctctgcagccacttcaggtgtaccaggcacccctgtccctggccaccgtgccccatcaagccctgggcagaactcaaagctctccggctgccccaggcggcatgaagtcacctcctgatcagcctgtaaaacatctttttaccacaggggttgtatatgacacatttatgttgaagcatcagtgtatgtgtggaaatacacacgtacatcccgaacacgccgggagaattcaatccatttggtcaagactccaagagaccggcctgctcagtaaatgtgagcggatacgaggacggaaagccactcttgatgagatccagactgtgcattctgaataccataccctcttgtacggtacaagccccctgaatcggcaaaagcttgactccaagaagcttttggggccgatcagtcagaagatgtatgcagtacttccatgcggcggcataggggtggatagcgatacagtctggaacgaaatgcacagcagttctgccgtgaggatggccgtggggtgtctgctcgagctcgctttcaaggtcgccgccggagagctcaagaatggattcgccataattaggccccccgggcatcacgctgaagagtccaccgccatgggcttttgcttttttaactctgtggcaattacggccaagttgttgcagcagaagctcaacgtagggaaggtcttgatcgtggactgggacatccatcacggcaatggcactcagcaggccttttataatgaccctagtgttctgtacataagcctgcatagatatgacaacggcaatttttttcccgggagtggtgcacctgaagaggtgggagggggccccggcgtgggttacaatgtcaacgtcgcttggacggggggagtcgatcccccaattggtgatgtcgagtaccttaccgcgtttcgcactgttgtgatgccgatagctcatgagttctcaccagatgtcgtactggtgagcgcagggttcgacgccgtggaaggccatctgagtcctttgggaggttactccgtcactgcacgatgtttcgggcatctgacaagacagctcatgaccctggctggagggagagttgtccttgcattggaaggcgggcatgacctgaccgccatttgtgacgccagtgaggcctgcgtgtctgccctgctctcagttgagcttcag

SEQ ID NO: 129 - DNA, 1131 bp, synthetic construct
  source 1..1131: mol_type = other DNA
gccaccatgtcccagcctaagaagcgcaagctggagtcaggcggtgggggtgaggggggggagggaaccgaagaagaagacggggccgaaagagaggccgctcttgaaaggcctcgaagaactaagcgggagcgagaccaactctattatgagtgttacagtgacgtttcagtgcacgaggaaatgatcgctgatagggtgaggacggacgcttataggcttggaatcttgcgaaattgggccgccctgcgcgggaagaccgttcttgacgtaggcgcaggcaccggcattctttcaatcttttgcgctcaagctggcgcaaggcgcgtgtacgctgtggaggcatccgcaatttggcagcaggctcgcgaagtggttcggttcaatggcctcgaagacagagtccacgttctccccggacccgtcgagacggtggagctccccgagcaagtggatgctatcgtatccgagtggatggggtacgggctcctgcacgaatctatgctgagtagtgtcctgcatgctaggacaaagtggcttaaagaagggggcctcttgctgcccgcaagcgctgaattgtttatcgcccctatatccgaccagatgctggaatggaggttgggattctggtctcaggtcaaacagcactacggcgttgacatgtcctgccttgaagggtttgccactaggtgcctgatgggacacagtgagatcgtggtgcaggggctgagcggggaagacgtcctggcccgcccacagcggtttgctcagctggaactgtcccgggccggcctggagcaggaactggaggccggagtaggggggcgatttcgctgctcatgctatggcagtgctcctatgcacggcttcgccatctggtttcaggtcacctttccagggggagaaagcgagaaaccactggtgttgtctacctctcccttccatccagctacccattggaaacaggcgctcctgtatctgaacgagcctgtgcaggtcgagcaggatacagacgtatccggagagatcaccctcttgcccagccgggataatccaaggcgactccgggtgctccttcggtataaggtcggcgatcaggaggagaaaactaaggactttgcaatggaggat

SEQ ID NO: 130 - DNA, 2502 bp, synthetic construct
  source 1..2502: mol_type = other DNA
gccaccatgacgtctacaggccaggactctaccactacaaggcagcggaggtcccggcagaatccgcagagcccaccccaagatagctctgtgacctctaaacgcaatatcaagaagggagctgttccaagaagcatcccaaacctcgcagaagtgaaaaagaagggaaaaatgaaaaaattgggccaggcaatggaagaggaccttatcgtgggccttcagggcatggacctgaatctggaagctgaggctctcgccggtacaggcctggtcctggacgagcagctcaacgaattccactgtctttgggatgacagtttcccggagggccctgagcgccttcacgctattaaagaacagctgatccaggaagggttgctggatcgatgcgtgtccttccaggcacggtttgcggaaaaggaagagcttatgctcgtgcactccctggagtatatcgacctgatggagactactcagtacatgaacgagggggagctgcgggttttggccgatacatacgattccgtgtacctccaccccaatagctatagctgtgcttgcctggccagcggaagtgtgcttcgactggttgatgcggtcctcggagccgaaatccggaacggcatggcaatcatccgcccgccaggtcatcatgcccaacactccctcatggacggttactgcatgtttaatcacgtggcagtcgccgccaggtacgcccaacagaagcataggattaggagggtcctgattgtagattgggacgtccatcatgggcagggaactcagttcacttttgatcaagatcctagcgtgctgtacttcagtattcatcggtacgagcaaggtcggttttggcctcatctgaaagcctcaaactggagcacgacaggctttggccagggacagggatatactattaacgttccttggaatcaggtcggcatgcgagatgctgactacattgccgcctttctccacgttctgcttcctgtcgcactcgaattccagccacagctcgtcctggttgccgctggctttgacgctcttcaaggtgacccaaagggtgagatggcagctactcccgccggcttcgcccaactgacacaccttcttatgggcctggcaggggggaagctgatcttgtctctcgagggcggatacaatctgagggcccttgctgagggggtttctgccagcctgcataccttgctcggcgatccgtgtcccatgctggagagtcctggggccccttgccgctccgcccaggcgagcgtgtcttgtgccttggaagcattggaacccttctgggaggtgctggtgagatcaacggagactgtcgagagggataatatggaggaggataacgtggaggaaagtgaggaggaggggccctgggaacccccggtactgcccattctgacttggccagtactgcaatcacgcacagggttggtgtatgaccagaatatgatgaaccactgcaacctctgggattctcatcatcccgaagttcctcagagaatccttcgcattatgtgcagactggaggaactgggccttgctgggcgctgtcttaccctgacaccccggcctgccaccgaagcagagcttctgacgtgccacagcgctgagtacgtcggccacctcagggcaaccgagaagatgaagacacgcgaactgcacagggaaagctcaaacttcgactccatttacatctgcccatcaacctttgcctgcgcacaactcgcaacgggcgccgcctgccgcctggtcgaggccgtcctctcaggagaggtccttaatggggctgcagtggtcaggcctcctgggcaccatgcggagcaggatgcagcttgcggattttgctttttcaacagtgtcgccgtcgcagcccggcatgcacagacgatttcaggacacgccttgcggatacttatcgtggattgggatgtgcaccatggcaacgggactcaacacatgttcgaagacgatccgtctgtgctgtatgtgtccctccacaggtacgaccacggcacatttttcccaatgggagacgaaggggcatctagccagattggcagagccgcaggtacaggcttcacggtaaatgtagcctggaatggcccccggatgggggacgccgattatctggctgcctggcataggcttgttcttcctatagcctatgagttcaatccagaactcgtactggtaagcgcaggctttgacgcggctcggggcgatccccttggcggctgccaagtgagcccggaggggtacgcacacctgacccacctgttgatgggtctggctagcggtcggatcattctcatcctcgagggcggttacaacctgacctcaattagcgaatcaatggctgcttgtactcgaagccttcttggcgacccacccccccttttgactctgccccgccctcccctgagcggcgccctggcgagtatcaccgagactattcaggtgcatcgccgctactggaga

SEQ ID NO: 131 - DNA, 1161 bp, synthetic construct
  source 1..1161: mol_type = other DNA
gccaccatgcggagcctgcgcgttatgaaagtagaggatcgggagggtcctagttcttccaaactggtgactaaaaaggctccgcaaccagccaagcctcggcttgccgagagaatgactacgagagagaagaaagtgctggaggctggcatgggaaaggtcacctccgcgtcttttggcgaagagtccacacctggtcagacaaatagcgaaaccgcagtggtggcactcactcaggaccagccctccgaggcggccaccggaggtgcaactctggcacaaaccataagcgaggcagccataggtggtgcgatgctcgggcagaccaccagcgaagaggccgttggtggcgcaactcctgatcagacaacaagcgaggaaaccgtggggggcgccattcttgatcagacaactagtgaggatgccgtcggcggcgccaccctcgggcagaccacttccgaagaggctgtgggcggtgcaacactggctcaaaccacgtccgaggctgcaatggaaggagccactctcgaccagacgactagcgaagaggccccgggcgggaccgagctgatccagactccgttggcttcaagcaccgaccatcagaccccgcccacatcccccgtgcagggcaccaccccccagataagccccagcaccttgatcggatctctgaggacccttgagctcggcagcgagtctcagggtgcaagtgagagccaggccccaggggaagagaacctgcttggtgaggccgccggtggccaggacatggctgactctatgctgatgcaaggctcccggggactcaccgaccaggccatcttctatgccgtcactcctctgccctggtgtccccatctggtggccgtctgtccaatcccagccgccgggttggacgtgactcagccctgtggggactgtggcacgattcaggagaattgggtctgcctgagttgctaccaggtatactgcggacggtacattaacgggcatatgctgcaacaccacgggaattctggacaccccctggtcctgagttacatcgatctcagcgcatggtgttattactgccaagcctatgttcatcatcaggccttgttggacgtgaaaaacattgcccatcagaataagttcggggaggacatgcctcatcctcat

SEQ ID NO: 132 - DNA, 1293 bp, synthetic construct
  source 1..1293: mol_type = other DNA
gccaccatgagtgggggggtctatgggggtgatgaagtaggcgctctggtcttcgacattggctcatataccgttagagcaggctacgcaggcgaggactgcccgaaggtcgattttcccaccgccatcggaatggtcgtggaaagagatgacggatccacgctcatggagatcgatggggacaaagggaagcagggtggcccaacatactacattgatacaaatgcgctgagggtgcctagggaaaatatggaagccataagccctctgaaaaacggtatggtggaggattgggacagcttccaggctatcttggatcacacttacaagatgcatgtgaaatccgaggcttcactgcatccagtgctgatgagtgaagccccgtggaataccagggccaagagagagaaactgacggaactgatgttcgaacattacaacattcccgccttctttctgtgcaagacagcagttttgacagcattcgcaaatggcaggtccaccggcctcatactcgacagcggggccacacacacaacggcaatcccggtgcacgatggctatgtgctccaacaggggattgtgaaaagccctctcgccggagatttcattacaatgcagtgccgggagctgtttcaagagatgaacattgaactcgtcccaccctatatgattgccagtaaagaagctgtgcgggaaggctctcccgccaactggaagaggaaggagaagctgccccaggttacaaggtcctggcataattacatgtgcaattgcgttatccaggatttccaggcatcagtgctgcaggtaagcgatagtacatacgacgaacaggttgcggcacaaatgcccaccgtgcactacgaatttcctaacgggtataactgcgatttcggcgcagaacggctgaagattccggagggcctctttgatcccagcaatgtgaaggggctgtctggcaacacaatgctgggggtttcccacgtagtgacaacttcagtgggcatgtgcgatattgatattaggcccggactttacggatctgtgatcgtagcagggggtaatactctgattcaatcctttaccgacaggctgaacagggagctctcccagaagactcccccctctatgcggctgaaactgattgcaaataacaccactgtcgaacgccggttttctagctggattggcggatctattctcgcttcattgggaacattccaacagatgtggattagcaagcaagaatatgaagaggggggcaaacagtgcgtggaaagaaaatgtcca

SEQ ID NO: 133 - DNA, 1224 bp, synthetic construct
  source 1..1224: mol_type = other DNA
gccaccatgacaacgccggccaacgcccagaacgcctcaaaaacatgggagctgagcctgtatgagctccacagaacaccacaagaggcaattatggatggtaccgaaattgctgttagcccgagatcccttcacagcgaacttatgtgtcccatctgcctcgatatgctcaagaataccatgaccaccaaggagtgtctgcatcgattctgttccgattgcattgtgaccgcactgagatctggaaataaagaatgccccacttgcaggaagaaactggtttcaaaaaggagtctcagaccagatccaaactttgacgccctgatctcaaaaatctatccttcccgagaagaatacgaagcgcaccaggatcgggtgcttattaggttgagccgcctgcacaaccagcaggctctgagcagctctatcgaagagggactgcgcatgcaagccatgcatcgggcgcaacgagtgcgccgacctattccaggttcagatcagaccacgacaatgtctggcggggagggtgagccaggagagggggagggcgatggcgaggatgtgtcatcagatagcgctcctgactcagcccctgggcctgcacccaagcggcccagggggggcggtgcaggcggctcaagcgtcgggacagggggcgggggaactggcggcgttggcgggggcgcagggtctgaggacagtggagaccgaggcggcactcttggcggaggcactcttggaccaccaagcccccctggggcgccttctccccccgaacctgggggcgaaatcgaattggtatttagaccacaccccctgctggttgagaaaggtgagtactgtcaaactaggtatgtaaagacaaccggcaacgccaccgtcgatcacctctctaaatacctcgccctccggatcgcgctggagcggcgacagcagcaggaagccggagagccaggcggacccggtgggggcgctagtgacaccggcggtcccgatggatgtggcggtgaaggcgggggtgctggaggcggtgacggccccgaggagccagccctgccttctctcgagggggtctccgaaaaacaatatacaatatatatagcccccggtggcggagcctttacaactcttaacggctccctgacgttggaacttgtcaacgagaagttctggaaagttagccggcccttggaactctgttatgcacccactaaggatccaaaa

SEQ ID NO: 134 - DNA, 3870 bp, synthetic construct
  source 1..3870: mol_type = other DNA
gccaccatgagagtggtttgtttcctgtgcgcctccagcggacatgtggagttcgtgtattgccaggtttgttgcgagccttttcataaattctgcctggaggaaaatgaacggcctctggaagaccagctggaaaattggtgctgcaggcgatgcaaattctgccacgtgtgtggaagacagcatcaggccaccaagcagttgctggaatgcaacaagtgtaggaattcctaccacccagagtgcctgggaccgaactatcccacaaaacccaccaaaaagaagaaggtgtggatatgcaccaaatgcgtgaggtgcaaaagctgcggaagtacaacacccggtaaagggtgggacgcccagtggtcacacgacttctcactgtgccacgattgcgcgaaactctttgccaaggggaatttttgccccctgtgtgataaatgctacgacgacgacgattacgaatcaaaaatgatgcagtgtggcaagtgcgataggtgggtccacagtaagtgtgaaaatctgagtgatgagatgtatgagatcttgtctaaccttccagagtccgtggcctatacttgtgtcaactgtacggagcggcaccctgctgagtggagactcgcacttgaaaaagagctgcagatatccttgaagcaagtgcttactgccctgttgaactccagaaccacctcacatctgttgaggtacaggcaggcagccaagcctcctgaccttaatccagagaccgaggaatccataccttcaagatcctctccggaaggacctgacccccctgttctcacagaggtctctaaacaggacgaccaacagcccctggatctggaaggggtcaaaaggaaaatggatcagggaaactatacctcagttcttgaattctcagacgatattgtcaagatcattcaagccgcaattaattccgatggcggccagccggagataaaaaaagctaactcaatggtcaagtcattctttatcaggcagatggagcgcgtctttccatggttttccgtgaagaagagccggttctgggagcctaacaaggtgagcagcaattctggcatgctgcctaatgcagtccttccacccagcctggaccacaactatgcacagtggcaggagagggaggaaaacagtcacaccgagcaaccccccctgatgaagaaaattatccccgccccaaaacctaaagggccaggggaacctgactctccaactcccctgcatcctcctactccgcctatcctctctacggacaggtcacgcgaggatagcccagagctcaaccctccccctgggattgaggataacaggcaatgcgcgctctgcctgacgtatggcgacgacagtgcaaatgacgccggaagattgctgtatattggacaaaatgagtggactcatgtcaactgtgccctctggtccgctgaggtgttcgaagatgatgatggcagtcttaagaatgtgcacatggccgtgatccggggaaagcagctgcgctgcgagttttgtcaaaaacccggggccaccgtgggatgctgcctgacttcatgtacttccaactatcattttatgtgctctagagccaagaactgcgtgttcctggacgacaagaaagtctattgccagcgccacagggacctcatcaagggtgaggtcgtgcctgaaaatggctttgaagtcttcaggagggttttcgtggattttgagggaatatcattgaggagaaaattcttgaacggactggaacctgaaaatatacacatgatgatcggctccatgacgattgattgcctgggtattcttaatgacctgtccgactgcgaagataagctgttccccatcggctatcagtgtagcagagtgtattggtccacaacagacgcgagaaagagatgtgtgtatacatgcaagattgtagagtgtagaccgccagtggtggagcccgacataaatagtacagtggaacatgacgagaatcggactatcgcccacagcccgaccagcttcactgaatcaagcagtaaagaaagccaaaatacggcagaaataatttctcccccctccccagaccggcctcctcacagccagacatcaggctcttgctactatcacgtcattagtaaggtgcctagaattcgcacacctagctattcccccactcagaggtctccgggctgtaggccgctgccaagtgcggggtctcccacacctactacgcacgaaatcgttaccgtgggtgacccgctgctgagctcagggctgcggtccattgggtccaggcgacactctacgtcatctctgtccccacaaaggtctaagttgagaataatgagccctatgaggaccggaaatacctattcaagaaataatgttagcagtgtgagtacgacagggacagccacagatctggagagctcagcaaaggtcgtggatcatgtcctgggccccttgaacagcagtacatcactcggccagaacacgtccacgagtagcaatctccagagaacagtggtcactgtgggaaataagaattcccacctcgacggatcctccagttcagaaatgaaacaatcatcagcatcagacctggttagcaagagctcatctctcaagggagagaagaccaaggtcttgagcagcaaatcatccgagggctccgcacacaatgtcgcatatcctggcattccaaaattggctccacaggtgcacaacaccactagccgcgagttgaacgtctcaaaaattggctctttcgctgagccaagctccgtgtctttctccagcaaagaggccctcagcttcccacacctgcacctgagaggtcagcgcaatgatcgagatcagcacactgacagcactcaatcagcaaacagctctccggatgaggacacagaggtgaaaacactcaagctcagtggaatgtctaaccgatcttccatcattaacgagcatatgggcagttcttcccgagacaggcgccagaagggaaaaaagagctgcaaggaaacctttaaggagaagcattcatcaaaaagtttccttgaacccggccaggtcaccactggcgaagagggtaacctgaagcctgaattcatggatgaagtgctgacaccggaatacatggggcagcggccctgcaataatgtctcatctgacaaaatcggggataagggactgagcatgcctggggttcctaaagccccgcccatgcaggtggagggctcagccaaagagctccaggcaccacgaaaaagaacggtcaaggtgactctgacaccccttaagatggagaatgagtcacagagcaagaatgcactgaaagagagcagccctgctagccccctccaaatagaaagtacgagtccaaccgaacctatcagcgctagtgagaaccctggcgacggacctgtcgcccagccaagtccaaataacacatcatgccaggattcccaaagcaataactaccagaatctgccagtacaagataggaacttgatgctgcccgacggcccaaaaccccaggaggatgggagcttcaagagacgctaccccagaaggtccgccagagctaggtctaacatgtttttcggtctgacacccctctacggggtgcggtcttacggggaggaagacatacccttttattccagttcaacggggaagaagagaggcaaaaggagtgccgaagggcaggttgacggagctgacgacttgtctaccagtgacgaggacgacttgtattactacaactttacaaggaccgtgatctcttccgggggtgaggaacgcctggcatcccataacctgtttcgggaagaagagcagtgtgacttgccaaagatatcacagctc

SEQ ID NO: 135 - DNA, 3168 bp, synthetic construct
  source 1..3168: mol_type = other DNA
gccaccatgggggtggatgacgggaccgagagtgatacaagtgtgactgccactactagaaaaagtagccagatccctaagcggaacggcaaggagaacgggacagaaaacctgaaaattgacaggccagaggatgctggtgaaaaggaacacgtcactaagtcttccgtcggacataagaatgaaccgaaaatggacaattgccactccgtcagccgcgttaagacccaggggcaagattccctcgaggcccaactttcctctctggaaagtagccggcgggtgcacacttccacccctagcgataagaatcttctggacacttataataccgaattgctgaagagcgattctgacaacaataattccgacgactgcgggaacattctgccaagcgatatcatggacttcgttttgaaaaataccccctctatgcaggccctgggggagtctccggaaagttcctcaagcgagttgctgaatctgggagaaggcctcggcctcgatagcaatcgcgagaaagatatggggctgtttgaggtgttcagccagcagcttcccacaacagagccggtcgatagctctgtgtcatctagtatttctgctgaggaacagtttgagctgcctctggaactgccctccgacctgtctgtgctcacaactcggtccccaacagtgccctcccagaatcctagccgactggccgttatctccgactccggagaaaagagagttacaattacggagaaaagtgtcgcctcaagtgagtccgaccccgcccttttgtcaccaggtgtagacccaaccccagaggggcatatgacaccagatcacttcatccagggacacatggatgctgatcatataagttcccctccctgtgggtccgtggagcagggccacggaaacaatcaagacctgacccgaaacagttccacacctgggcttcaagttcccgtaagccccaccgtgcctattcaaaatcagaagtacgtgcccaactccaccgactcccctggcccttcacaaatctccaacgctgccgtgcaaaccactcccccccatcttaagcccgctacggaaaagctgatcgtggttaatcagaacatgcagccactttatgtgctgcagacactgccgaacggtgttacacagaagattcagttgacgagtagcgtatcaagcacacccagcgtcatggaaacaaatacttctgtccttggacctatgggcggtggcctgactctcacaaccggtctgaaccctagtctgcccacatcccaaagtctgtttcccagcgccagcaaggggctgctgcccatgagccaccatcagcacctgcacagttttccagccgctacccagtcttcttttcctcctaacatctctaacccccccagcgggctcctcatcggagtgcagcctcctcccgatcctcagctgctggtgtctgaatcctcacagaggacagacctttctacaacagttgctacaccctctagcgggctgaagaaaaggcctatctctaggcttcagaccagaaagaacaaaaagctggctccgtcaagcaccccctccaacattgctccctctgacgtagtgtcaaatatgactctgatcaacttcactccctctcaactccccaatcacccctcactgctggacctcgggagtctcaatacctcatcacatcggactgtcccaaatattatcaagagatcaaagtctagcatcatgtattttgaacccgcacctctgctcccacaatctgtaggcggcactgctgcaacagcggctgggacgtccactattagccaagacacgagccacctgacttcaggatctgtgagcggacttgcgtcatctagtagtgtgctgaacgtggtgagtatgcagacaactaccactccaaccagcagtgcgtctgtgcctgggcacgtcactcttactaacccacggctgctcgggactcccgacatcggcagcataagtaacctgctgatcaaagcctcccagcagtcccttggcatccaagaccaaccagtggccttgccaccaagttcaggaatgtttccacagctggggacaagccagaccccgtctaccgccgccatcactgccgcctcttcaatttgtgtgctgccttccacgcagaccactgggatcacagcagcgtcacctagcggcgaggctgacgagcactaccagctgcagcacgttaatcaactgctcgcctccaagactggaattcattcttctcagcgagatctggattctgcttctggccctcaggtatcaaattttactcagactgtggacgcccccaactcaatgggcctcgagcagaataaggcactctccagtgccgtgcaggcctcccccactagccccggcggatcaccctcatccccctcttctggccaacgcagtgcgtctccttctgtgccggggcccacaaagccaaaacccaaaaccaaacgcttccagcttccattggataaaggcaacgggaaaaagcataaagtgtcccatctgcggacctcttcatccgaagcccacattccagaccaagagactactagcctgaccagtgggactggcacccctggagccgaggctgagcaacaggataccgcatccgtggagcagagtagccaaaaggagtgtggacaaccggcagggcaagtagctgtgctgcctgaagtgcaggttacgcagaaccccgctaatgaacaggagagtgccgaacctaagaccgtggaagaagaggagtctaacttcagttccccgctgatgctttggctccagcaggagcagaagcgaaaagagtccattaccgaaaaaaagccaaaaaagggtctcgtttttgaaatctctagcgatgacggctttcagatttgcgctgaaagcatagaggatgcctggaagagtctgacggataaggtgcaagaggctaggagtaacgcaagactcaaacaactcagcttcgccggcgtaaacgggctgcgcatgctgggtatactgcacgatgccgtcgtcttcctgattgagcagctctctggagccaagcactgccggaattataagttcaggttccataaacccgaggaggcaaatgaaccgccactcaatccacacggctccgcaagggctgaggtgcacctgcgc

SEQ ID NO: 136 - DNA, 657 bp, synthetic construct
  source 1..657: mol_type = other DNA
gccaccatgaatgaacctcctctcaacccacacggctccgcaagggcagaagttcatttgcgcaaatctgctttcgacatgttcaatttcctggcttctaaacacaggcagccgccggaatacaatcctaacgacgaggaggaggaggaggtacagctgaagtccgcacggagagccacttcaatggatttgcccatgcctatgcggtttaggcacttgaaaaagacctccaaggaagctgttggagtttaccggagtccgattcacggaagaggcctcttctgtaagagaaacatcgacgccggcgagatggtgatcgaatatgctggcaacgtgattagatctatccagacggataaaagggagaaatactatgactccaaagggatcggctgttacatgttccggatagacgattctgaagtggtggatgcaacaatgcacgggaatgccgctcggttcataaaccactcctgcgaacccaactgttacagtagagtgatcaatatagatggccagaagcacatcgttatctttgctatgcgcaagatctatcgcggcgaggagcttacatacgattacaagttcccaatcgaagatgcaagtaacaaactgccttgcaattgtggcgccaagaaatgccggaaatttctgaat

SEQ ID NO: 137 - DNA, 3123 bp, synthetic construct
  source 1..3123: mol_type = other DNA
gccaccatggaaaactcccatcctccacaccaccaccaccaacagcctcctcctcaaccaggcccaagcggtgaaagacgaaaccatcattggagaagctacaagctgatgatcgacccggccctgaaaaaggggcatcacaaactctacaggtacgacggccagcacttcagtctcgccatgagttctaatcgcccagtcgaaatagtggaggatccaagagtagtaggcatatggactaagaacaaagaactcgagctgtctgtgcccaagtttaaaattgacgagttttacgtgggacctgtacctcccaaacaggtgacttttgccaaactcaatgacaacattcgagagaacttcctccgggacatgtgcaagaaatatggcgaggtagaggaagtcgaaatcctgtacaacccaaagacgaaaaaacatctggggattgcaaaagtggtttttgctaccgttagaggtgcaaaggatgcagtccagcacctccattctaccagtgttatgggcaatattatccatgtcgaactggatactaagggcgagacacggatgcgattctacgagctcctcgtgacagggagatatactccccagacacttcctgttggagagcttgacgctgtctcccccatagtaaatgaaaccctgcaactttccgacgccctgaagcggctgaaggacggcggcctgtccgccgggtgtggttccggaagcagcagcgttacccctaactccggaggcacacccttttcacaggacaccgcctattcttcatgccgcttggacaccccaaatagttacggccagggaaccccactgaccccaagactgggaactcctttttctcaggattcctcctatagtagccgccagccgacaccgtcttacctgtttagccaggaccctgctgtcacttttaaggcccggagacatgagtccaagttcacagacgcttacaatcggaggcatgagcaccattatgtgcacaatagccccgctgtcacagctgtagctggagccaccgccgcattccgcggcagtagtgatctgccctttggcgcagtggggggcacgggcgggagctctggccccccttttaaggcccagcctcaggactcagctaccttcgcgcacaccccacccccggcacaggcgacacccgcccctggattcaagtctgcgttctcaccatatcaaacaccagtagcgcacttccccccgccccctgaggaaccaacagcaaccgccgccttcggggcgcgcgactccggagaattcaggagggcaccagccccacctccactgcccccggccgaacctcttgccaaggagaaacctgggacccctcccggcccacctccgcccgatacgaactctatggagttgggcgggcggccaacatttggatggtccccggaaccatgtgatagccctgggacgccaaccctggaaagcagcccagctggtcctgaaaaaccccatgacagtctcgacagccgcatagaaatgcttctcaaggaacagcggaccaaattgctgttccttcgagagccagacagcgacaccgagctgcagatggaggggtctccaattagctcctctagcagccaacttagtccgcttgcaccgtttggcactaactcccagcccggctttcgcggccctaccccgcccagcagccgcccttcttccactggactggaggatattagccccactcccttgcctgattcagatgaggacgaagagttggacctgggactgggacctcggcctccccctgagcccggcccacccgaccctgcaggtctgctctcccaaaccgctgaggttgccctggatttggtgggcgacaggacgcccacctccgagaaaatggacgagggccagcagagcagcggcgaggatatggaaattagtgatgatgaaatgccatctgcacctataacatcagcagattgcccaaaaccgatggtggtgacgcctggcgcagctgcggttgctgctccaagtgtgttggcccccactctgccacttcctcccccacccggatttcccccacttccgccccctccacctccgcctcctccccagcctggttttcccatgccacctcctctgcccccgccaccaccccctcccccccccgcccacccagcagtaaccgtcccaccaccacctctgcctgcacctcctggcgtccctcctccgccaatcttgcctcctctgccgccctttcccccaggactgttccccgtcatgcaggtggatatgtcacacgtgctcggcggccaatgggggggcatgccaatgtccttccagatgcagacccaggtgctttctaggctcatgaccgggcagggcgcttgtccatatcctcccttcatggccgcagcagcggcagcagcatccgccgggttgcaattcgtgaatctccccccatataggggccccttcagcctgtcaaactcaggacctggccgggggcagcattggccccccctgcctaagttcgacccttccgtgccaccccccggatacatgcccaggcaggaagacccacataaggccaccgtcgacggggtgctgcttgtggttctcaaagaactgaaagccatcatgaaacgggatctcaatcgcaagatggtagaagtcgtggcttttcgggcgttcgatgagtggtgggacaagaaggaaagaatggcaaaggcgagtctcacgccggtgaagtccggggaacacaaggacgaagatcgccccaagcccaaggataggatcgctagttgcctccttgagagctggggcaaaggagagggacttggctatgaaggcctggggctggggattggactccgcggggccataagactgccgagcttcaaggtgaagaggaaggaaccgccagacaccacaagcagcggggaccagaaacggcttcggccatccacttccgtggacgaggaagatgaagagagcgagagggagagggaccgggatatggctgacacaccctgcgaactcgcgaagcgcgaccctaaaggagttggcgtgcggcgcagacccgcccgcccgcttgaattggatagcggtggtgaggaagacgagaaagaa

SEQ ID NO: 138 - DNA, 2790 bp, synthetic construct
  source 1..2790: mol_type = other DNA
gccaccatgagtctgtctgcatctagctcctctagtgcgtcctcttccagtggttccagcacaacttccccaagcagttcagcatctgacaaagaggaagaacaggaatcaactgaggaggaggaagaggcggaagaagaagaggaagaggaggtccccaggtctcagttgagctccagctccactagtagcacgagcgataaagatgacgacgacgatgacagcgatgacagggatgagtccgagaatgatgacgaggatacagccctgagtgaggccagcgagaaggacgaaggggattccgacgaagaagaaaccgtcagcattgtaacctccaaggccgaggctacttcttcctctgagtcctccgaatcttccgagttcgaaagttcctccgaatcatctcccagtagctccgaggacgaggaggaggtggtggcaagagaggaggaggaagaagaagaagaagaggaaatggtggctgaagaatccatggcatctgctggacccgaagattttgagcaggacggcgaagaggccgctctcgcgcccggagctccggccgtcgatagcctggggatggaagaagaagttgacatcgaaacagaagcggtagcgcctgaggagcgcccgtccatgctggatgagcctcctctgcccgtaggtgtggaggagcccgccgatagccgagagcctcccgaagagccgggtttgtctcaggaaggtgccatgctgctgagccccgagcctcccgctaaagaagtagaggctcgacctcctctgagccctgaaagggcccccgagcacgacctggaagtggaaccagaacctcctatgatgctcccactgcctctccagccacctcttccacccccacgaccccccagacctcccagtccgcccccagagcctgaaactactgacgcttcacatccaagcgtgcctcctgaaccccttgctgaggatcacccgcctcacacccctggattgtgcgggtctctcgcaaagtcccagtcaaccgagactgtgcccgctaccccaggtggagagccacccctgtccgggggatccagcggcctcagtctttctagccctcaggttcctggatctccattttcctatcccgctcctagccccagccttagcagtggcggccttccccggacaccaggccgagatttctctttcacccctaccttttcagagccgagcggtccactgctgctgccagtttgtccgctgcctacgggtcgccgcgacgagagaagcggaccactggccagtcctgtgctgttggagactgggcttcctttgcccctccccctgcccctgcccctcccattggcattgcccgcagtgctccgagcacaggcccgcgccccaactccgcttccccctttgctgccggctccacttgcaagctgccctccaccgatgaaaaggaagcccgggaggcctaggagatcaccccctagcatgcttagcctggatggccccctggtaagacctccggccggagccgccctcgggcgggagctcctcctgttgcctggccagccccagactcctgtgttcccttctacgcatgatccgaggaccgtcacgctcgattttaggaatgccggcattcccgctcctcctcctccgctccccccccagcccccaccaccacctcctcctccacctgtggagccaacaaagttgcccttcaaggaacttgacaatcaatggccaagcgaagcaataccaccagggccacggggtagagatgaagtgaccgaggagtatatggagctggctaagtctagaggcccctggaggcggccgccaaaaaaacggcatgaagaccttgtgccccccgcggggagtccagagctgtcacccccgcaacccctcttccgcccccggtctgaattcgaggaaatgactattctgtacgatatttggaacgggggcattgacgaggaagacataaggtttctgtgcgtgacctacgaaaggctcctgcagcaagataacggtatggattggctgaacgacaccctgtgggtgtaccatccctcaacctcactgtcatccgccaaaaaaaagaagcgggacgacggtattagagagcacgtgaccggatgcgctcgaagcgaaggattttataccatagacaagaaagataagctgaggtacctcaattctagtcgagctagtaccgatgaaccacccgcggatactcagggaatgtctattccggcacagccacacgcatctacccgggccggctctgagaggcggtcagaacagcggaggctgctgagctcattcaccggaagctgtgattccgacctcctgaagtttaatcagcttaagtttaggaaaaaaaaactgaagttctgcaagagtcatatccacgattgggggttgtttgctatggaacctattgcggccgacgaaatggtgattgaatatgttggacagaatattcggcaggtgattgcagatatgcgggaaaaaagatacgaggacgagggtatagggtctagctatatgttccgagtagatcacgacaccatcattgacgccacaaaatgcggcaattttgctcgctttattaatcattcctgcaaccccaattgttatgccaaggtgattaccgtagaaagccagaagaaaatagtaatctactccaaacagcatattaacgtgaacgaagaaattacctacgattataagttccccattgaggacgtaaaaattccgtgcctgtgtggaagcgaaaactgtaggggaacacttaat

SEQ ID NO: 139 - DNA, 1095 bp, synthetic construct
  source 1..1095: mol_type = other DNA
gccaccatgtttgcggaagctgctaaaaccacacgaccctgtggtatggctgaatttaaagaaaaacccgaagcacctacggagcagctggacgtggcgtgcgggcaggaaaatcttccagtgggcgcatggccaccaggcgccgccccagctccattccaatacacaccagatcacgtggtgggccctggggcagacattgaccccacccaaatcacgtttccaggctgtatctgcgtgaaaactccttgcctgcccggtacatgctcttgcctcagacatggcgagaattacgacgataattcatgcctcagggacatcggatctggtggaaagtatgctgaacctgtctttgagtgtaacgtcctttgccgctgttcagaccattgcagaaatagggtcgtgcagaaaggactccagttccatttccaggtcttcaagactcacaaaaaaggctggggcctgcgcacactggagtttatacccaaggggagattcgtttgcgaatatgccggagaggttttgggcttctccgaggtgcagaggaggatccacctccagacgaaatcagattcaaactatataattgcaattcgagaacacgtttacaacgggcaagtaatggaaacattcgtggatccgacatatatcgggaacataggccgattcctgaaccattcctgtgagcccaatcttctgatgatcccggtgcggattgattcaatggttcccaagctggcactgttcgctgctaaggatatcgtcccagaggaggagctgagctatgactattcagggaggtatttgaacctgaccgtatctgaagacaaagagcgcttggaccacgggaagcttcgcaagccttgttattgcggtgccaaaagctgcacagcatttctccccttcgacagcagcctgtattgccctgtagaaaaatctaatatcagctgtgggaatgagaaagaaccctctatgtgcgggagcgccccttccgtgtttccttcttgcaagcgccttaccctggaaacaatgaaaatgatgctcgataaaaagcagatcagggctatttttctgtttgagttcaaaatggggagg

SEQ ID NO: 140 - DNA, 717 bp, synthetic construct
  source 1..717: mol_type = other DNA
gccaccatgcaaatagggaaggtaaagaaactggacaaatgggtaccacatgagctgacagagaatcaaaaaaacagaagattcgaagtgtcatcaagcctcatcctgagaaatcacaacgagcccttcttggatcggatagttacatgtgatgagaaatggatcctgtacgataatcgaaggcggagtgcccagtggttggaccaggaggaggcccctaagcactttcccaagcctatcctccaccctaaaaaggtgatggtcaccatttggtggtccgcggcgggcctgatccattacagcttcctcaaccccggagaaacgatcacaagcgagaagtacgcccaggagatcgatgagatgaaccagaaactccagagacttcagctggctttggtcaaccgcaaaggacctatcctcctgcacgacaacgctaggccacatgtggcacagcccacactgcagaagctcaatgaactgggctatgaggtactcccacaccctccttactctcctgatttgctccccacgaactaccacgtgttcaaacaccttaataacttcctgcaagggaaacggttccacaaccagcaggacgcagaaaacgcattccaggagtttgtggaaagccaatcaactgatttctatgctacagggattaaccagctgatcagcagatggcagaaatgtgtcgactgcaatggcagctacttcgac

SEQ ID NO: 141 - DNA, 1803 bp, synthetic construct
  source 1..1803: mol_type = other DNA
gccaccatggagtctacaccaagtttcctcaaaggaacccccacgtgggaaaagaccgcccccgagaacggcattgtgagacaggagcccggttctccaccccgggacggtctgcatcacggccccctgtgcctgggagagcccgctcccttctggaggggagtgttgagcacacctgacagctggctcccacctggattcccgcagggaccaaaggatatgctgcctttggtagagggagaggggccacaaaacggcgagcgcaaagttaactggctgggctcaaaggagggcctgaggtggaaggaggccatgctgactcatccattggctttttgcggccccgcttgcccgccacgatgcggcccgcttatgcctgagcatagtggcggacaccttaagtccgatcccgtggctttccgaccctggcattgccctttcctgctcgagactaaaatcctggagagagccccattctgggtgccgacatgtctgcctccatacctcgtgtccggattgccccccgagcacccctgcgattggccgctcacaccacacccatgggtgtattctggcgggcagccaaaagtgcctagcgcattctccctgggaagtaagggtttttactataaggacccgtcaattccccgcctggctaaagagcctcttgccgcggcagaaccggggctgtttggcctgaatagtggcggccaccttcagagggcgggcgaagccgagaggcctagtttgcaccagcgcgacggagagatgggagctggccgacagcagaatccctgccctctgttcctcggccaacccgataccgtgccttggacttcctggccagcctgtccacccggcctggtacacactctcggcaatgtatgggctggccccggtgatggaaatctcgggtaccaactcgggccccccgcaaccccccggtgtccttcccccgagccacccgtcacccagaggggctgctgctcatcatatcctccaactaagggggggggactggggccgtgcggtaagtgccaggagggactggaaggcggcgcaagtggagcttcagaaccgagcgaggaggtgaataaggcttctgggccaagagcctgtccccctagccatcataccaagctgaagaagacctggttgacaaggcatagtgagcagttcgagtgtccaagaggttgtcctgaagtagaggaacggcccgtggcccgattgcgcgcacttaagcgcgcagggtctccagaggtacagggtgccatgggctcccccgcccctaaacgaccgccagacccgttcccgggcactgccgagcaaggtgctgggggatggcaagaagtgagggatactagcatcggcaacaaggatgtcgatagtggccagcacgatgagcaaaagggtcctcaagacggccaggctagcttgcaggacccaggtctgcaagatattccctgtctggctttgcctgccaagttggctcagtgtcaatcctgcgcgcaggccgcaggcgagggcggtggtcatgcttgccattcccagcaggtgcgccgcagtcctcttggaggagagctgcagcaggaggaagacactgcaacaaattcttcctcagaggagggtcctgggagcggacccgacagccgcctctccacggggctggcaaagcaccttctgtcagggctcggcgatcggctgtgcaggctgctgcgccgcgaacgcgaggccctggcctgggctcagagagagggtcaggggccagccgtgacagaggacagccctggtatccctaggtgt

SEQ ID NO: 142 - DNA, 1701 bp, synthetic construct
  source 1..1701: mol_type = other DNA
gccaccatgggccgagttgccggtaccggtcgggcccgcgagaaggctggcttccaggaacagtctgccgaagagtgcactcaggaggcagggcatgctgcctgtagtctgatgttgacacagtttgtgtcaagtcaggcgttggccgagcttagtactgccatgcaccaggtatgggtcaaatttgatataagagggcactgtccctgtcaagccgatgcaagagtatgggcccctggcgacgccggtcagcagaaggaaagtactcagaaaactccacccactccccaaccatcatgcaacggggatacccatcgaaccaagtcaatcaaagaagagacgcccgactcagccgaaactcctgccgaagacagagcaggaaggggccccctgccgtgcccaagtctgtgtgagttgttggcgagtactgcagtgaaactttgtctcggacatgagcggatccacatggcgttcgcacccgtaacacccgctctgccttctgacgacagaattaccaacatattggactctattattgcgcaagttgtcgagaggaaaattcaggaaaaagctctcggacccggcctgagggcgggacctgggctccgcaaggggctggggcttcctctttctccagtcaggccacggcttccccccccaggcgcactgttgtggttgcaagaaccccaaccttgcccacggagagggtttcacctgtttcaggaacattggagacaaggccagccagtgctcgtgtccggtatccagagaacgctgcaaggcaatctctgggggacagaggccctcggcgcccttggaggacaggtgcaggccctcagcccattgggacccccccagccttccagcctcgggtctactacattttgggagggttttagctggcccgagctccgaccaaagagcgacgaaggaagcgttttgcttctgcaccgggctttgggggacgaggacacgtcccgcgtggagaacctggctgcttccctgccattgccggagtattgtgcgctccacggtaaactgaacctggcctcttacctcccccccggccttgcgctgcgaccactggaaccacagttgtgggcggcttatggtgtgtcacctcacagagggcacctcggaacaaaaaatctgtgtgtggaggttgctgacctcgtttctatcctggtccatgcagacaccccccttcctgcatggcaccgggcccagaaggattttctgtcagggctggatggtgagggcctgtggagtcccgggtcccaagtgagcacagtgtggcacgtgtttcgcgctcaggacgcccagagaatcaggagattcctgcagatggtctgtccagccggggctggcgctttggagcccggtgccccaggcagctgctacctggatgccggattgcggcgccgcctgagggaggaatggggcgtgagttgctggacgcttctgcaagcccccggagaagctgtactggtacctgccggcgcaccccaccaggtgcaaggcctcgtgagcaccgtttcagtgactcagcactttctctcccctgagacatcagctctgagcgcccagctgtgccaccagggaccgagcttgccccccgactgccatctgctgtacgcacagatggactgggcagtctttcaagccgtaaaggttgccgtcggaactttgcaggaggccaaa

SEQ ID NO: 143 - DNA, 1083 bp, synthetic construct
  source 1..1083: mol_type = other DNA
gccaccatgaatcaaaatactaccgaaccagtagcagccaccgaaaccctggccgaagtgcccgaacacgtgctgcgcggcttgccagaagaggttagactctttccgtccgcagtggacaagacacgaatcggcgtttgggcgaccaaacctattcttaagggcaaaaagtttggaccgtttgtgggagacaaaaaaaaacgctctcaggtgaagaacaacgtctatatgtgggaggtatattacccaaacttgggatggatgtgcatcgacgccaccgatcctgaaaaaggaaactggctcaggtatgtgaattgggcctgcagtggcgaagagcagaatctttttcccctggaaattaatagggcaatatattacaaaacgctcaaacctattgcaccaggcgaggagctgcttgtctggtataatggggaagacaaccctgaaatagctgctgccatcgaagaggagagagcgtctgcaaggtcaaaaagatccagccccaagtctcggaagggaaagaaaaaaagccaagaaaataaaaacaagggaaacaaaattcaggatatacaactcaaaactagtgaacctgactttactagcgctaatatgcgcgatagtgccgaaggcccaaaggaagacgaggaaaagccctccgcttcagccctggaacagcctgccacgctccaggaagtagcatctcaggaggtccccccggaattggcaactcccgctcccgcctgggagcctcaaccagaaccagacgagagactggaggccgcagcttgcgaagtcaatgacctcggggaggaggaagaagaagaggaagaggaggatgaagaggaggaggaagacgacgatgatgatgaactggaggacgagggagaggaagaagcaagcatgccaaacgaaaattccgtgaaggaacccgagatcaggtgtgacgagaaacctgaggatttgcttgaggagccaaaaacgacgagtgaggaaacactcgaagactgcagtgaagtaactccagctatgcaaatccctcgaacaaaggaagaagctaatggcgacgtcttcgaaacttttatg

SEQ ID NO: 144 - DNA, 1890 bp, synthetic construct
  source 1..1890: mol_type = other DNA
gccaccatggaacgccacttgatccctaagggcgtgagacgcaaaggaggccttgaggagcctcagccacctgccgaacaagcgcaggccacccagaacgtgtatgtccctagcacagaaccagaagaagagggagaagccgatgacgtctacatcatggatatatccagcaacatttctgaaaatctgaactattacatcgacggaaagattcagaccaataacaacaccagcaactgcgacgttatcgagatggagagcgcatcagctgacctgtacggcattaattgcctgcttacacctgtcactgtggagatcacccagaatatcaaaaccacccaggtgccagtcaccgaggacttgccaaaggagccactgggcagcactaactccgaagcgaagaagcgaaggaccgcgagcccgcctgccctccccaagataaaagccgagacagactcagatccaatggtgccctcctgtagcctgtccttgcctctctctattagcacaaccgaggcagtctcattccacaaggaaaaaagtgtgtacctgtcttccaaactgaagcagctcctgcagacccaggacaaactgactcccgctgggattagtgcgaccgagattgcgaaacttggccccgtgtgtgtgtctgcccctgcgtctatgcttcctgtgacctcatcacggttcaaacgcagaacatcttcccccccatccagtccacagcattccccagcactcagagacttcggaaagcctagtgatggtaaggctgcatggaccgacgccggcttgacttccaagaagtctaaactggaaagccactccgactcaccggcttggagcctgtccggtcgggacgaaagagaaacagtgtcacctccatgttttgatgaatacaaaatgagcaaggagtggaccgctagctccgctttctcatccgtgtgcaatcagcagccccttgacttgtcaagcggagtgaaacagaaagccgagggcactgggaagaccccggtgcaatgggagagcgtcctggatttgtctgtgcacaaaaagcactgctccgacagtgaggggaaagagtttaaggaatctcactccgtacagcctacttgcagtgccgtcaagaagcgcaagccaacaacatgcatgctgcagaaggttttgctgaatgaatataatggtatcgacctgcctgtggaaaacccagctgacggcacacgatcccccagtccatgtaaatcactcgaagctcagcccgacccagatctgggaccaggaagcggctttcctgctcctacagttgaatctacacccgatgtgtgtcccagcagccctgctctgcagactccctctctctcttccggccaactcccaccactgctgatacccaccgacccttctagtccgcctccatgtcccccagtcttgacggtagctaccccaccacccccgcttctccccaccgtgccattgcccgcaccctcaagttctgcctcacctcacccatgcccctcaccactctccaacgccaccgctcagagccctctgcccatactgtcaccaactgtctctccaagcccctcccccatcccaccagtagagccgctgatgtcagctgcctcacctgggccgcccaccctctcatcctcctcatcatcttccagctcttcaagctctttttcatcttccagcagcagtagcagccccagcccccctccgctcagtgctatctcctcagttgttagcagtggcgacaacctggaggcctccctcccaatgatttcctttaaacaggaagagctggaaaacgaaggcctgaagccacgcgaagagcctcagagcgctgctgaacaagacgtcgttgtgcaggagacttttaataaaaac

SEQ ID NO: 145 - DNA, 1521 bp, synthetic construct
  source 1..1521: mol_type = other DNA
gccaccatgcctgacaaggtgtgcacacatcatgagttcgaatccggcaccctccgcccgcaaaatttcacggatcctagcaaggctcacgtggagcacatgcaaagcctgccagaggatcctctggaaacctctaaggaggaggaggagctgaatgatagctctgaggaactgtacaccaccattaagattatggcgagcggaatcaagactaaagacccggacgtgcgccttggactcaaccagcactatcctagtttcaagcctccgccatttcagtatcaccataggaacccaatgggcatcggcgtaaccgccactaatttcacaacgcataatatccctcagacattcacgaccgcaattagatgtactaaatgtggaaagggcgttgataacatgcctgaactccataagcatattctcgcgtgtgcttccgcgtctgataaaaagcggtacaccccaaaaaagaacccggtgccccttaagcagactgtacagccaaagaacggcgtagtggtcctggacaatagcggaaagaacgcattcaggagaatgggacagccaaaaagactgaatttttcagtcgagctgtctaagatgtcaagtaacaaactgaagcttaacgcgcttaaaaagaaaaaccagctcgtccagaaagcaattctccagaaaaacaagagcgctaagcagaaggcagacctcaaaaacgcatgcgagtctagttcacacatctgtccatactgcaacagagaattcacgtatatcggctctcttaataagcacgccgctttcagctgccctaaaaagcccctctctccgcccaagaagaaggtgagccactccagcaaaaaggggggccactcttcacccgccagcagcgataagaactctaactccaaccaccgccggcggacggctgacgcagagattaaaatgcagagtatgcagactcctctgggaaagacaagagccagatcttccggccccacacaagtacctctcccctcctccagctttagatctaaacagaacgtgaaatttgccgccagcgtcaaaagcaaaaaaccatcctcaagcagcctccggaacagcagccctatccgcatggctaaaattacccacgtggagggaaaaaagcctaaggcagtcgcgaagaaccactccgcccaactgagctctaaaaccagccgcagtctgcacgtgcgggtacagaagtctaaagctgtgctccagtccaaaagtacactggcgagcaagaagagaacagaccggtttaacattaagagtcgggaacgatctggcggacctgtcactcggagtctccagcttgctgcagcagctgatctcagtgaaaataagagagaggatgggagtgcaaaacaggagttgaaagatttttcctatagtcttaggctcgcctccagatgtagcccgccagctgccccctacatcacgcgacaatacaggaaggtgaaagcgccagcggcagctcagttccaaggcccattcttcaaagag

SEQ ID NO: 146 - DNA, 1014 bp, synthetic construct
  source 1..1014: mol_type = other DNA
gccaccatggagaagtatttgtccgaactggccgagcagccggaaagaaaaataacaaggaatcagaaaagaaaacatgatgagattaaccacgtccagaaaacctacgcggagatggaccccaccacagctgcgcttgaaaaggaacacgaggcaattacaaaagtcaagtatgtcgataagatacatattggcaactacgagattgacgcttggtactttagccctttccctgaagattacggcaaacagccaaagctctggctttgcgagtactgtcttaagtacatgaaatacgaaaagtcatatcgctttcacctgggtcagtgccagtggcggcagccccctggtaaagaaatctaccggaagtccaatatcagcgtatatgaagttgacgggaaagaccacaagatttactgtcagaacctgtgcttgcttgctaagctgtttttggatcataaaacattgtacttcgatgtggagcctttcgttttttacattctcactgaggtggatcggcaaggagcacacatcgtgggttatttttctaaggaaaaggaaagtccagacgggaataacgtggcgtgcatccttaccctgcctccatatcagagaagaggctatggtaagtttctgatagcttttagttacgagttgtcaaagctcgagtcaactgtgggatccccagaaaaaccactgtctgatttgggtaagctgtcctatagatcatactggtcatgggtgctgctcgagattctccgagacttcagggggacactctccataaaagacctgtctcagatgacttctatcactcaaaacgatatcattagtaccctccagtccttgaatatggtaaaatactggaagggccagcacgtcatctgcgtaacgcctaaactcgttgaggaacacctgaagtctgcgcagtataagaagccacctattactgttgactctgtctgtctgaaatgggcaccacctaaacacaagcaagttaaactgagcaaaaaa

SEQ ID NO: 147 - DNA, 1695 bp, synthetic construct
  source 1..1695: mol_type = other DNA
gccaccatggagccagaggaggaaagaatccgctattctcagagactgagagggaccatgcggcgaagatacgaggatgacggtatcagcgacgatgaaatcgaaggtaaaagaactttcgaccttgaggaaaagcttcacacaaacaagtacaatgctaatttcgtgacctttatggagggtaaggactttaacgtggagtacattcagcggggcggcctccgggatccccttatttttaaaaatagtgatggcctcggcattaagatgcccgacccggacttcacagttaacgacgtgaaaatgtgtgttggctcccggagaatggtggacgtgatggatgtgaacacccaaaagggcatcgaaatgacgatggcccaatggaccagatactacgaaacacctgaggaggagagagaaaagctctacaatgtcatcagtttggaattttctcacacgagactcgagaacatggtccagagacccagcaccgtggatttcattgattgggtcgataacatgtggccgcggcatcttaaggagtcccagaccgaatccaccaatgcaatcttggaaatgcagtatcccaaagtacaaaaatattgcctgatgtcagtgcggggttgctacaccgacttccatgtggattttggcggcacctccgtttggtaccacatccaccagggcggcaaggttttttggctcattccacctacagcccacaatcttgagctgtacgagaattggttgttgagcggcaagcagggcgatatctttcttggcgacagagtttcagattgccagagaattgagttgaaacaaggctataccttcgtgataccgtctggatggatccacgcagtttacacgcctacagataccctggtattcgggggcaacttcctgcattcctttaatatacccatgcaattgaaaatctacaacatagaagatcgaacccgagtgccgaataaatttaggtatcctttttactatgagatgtgttggtacgtcttggagcgctacgtttactgcatcaccaaccggagccacctcaccaaagagtttcaaaaggagagtctgtctatggatctcgagcttaacggactggaatcaggcaatggcgatgaagaagctgtcgacagggagccacgaagactcagcagccggcggtcagtgctgacctctcccgtggccaacggcgtgaacctggactatgacggccttggaaagacttgccgctccctgccatccctgaaaaagaccttggccggagattcttctagcgattgctccagaggatcacataatggccaggtgtgggacccacagtgtgcgccaaggaaggaccggcaggtacatcttactcatttcgaacttgaaggcttgcgctgtttggttgacaagctggagagtctgcccctgcacaaaaagtgcgtccctacgggcatcgaagacgaagatgctcttatcgctgatgtgaaaattctcctcgaggaacttgcaaacagtgatcctaagctggctctgactggggtaccaatcgtgcagtggcctaagcgggacaaactgaagtttccaaccaggccaaaagtgagagttcccacaattccgatcacgaaaccgcatactatgaagcctgcaccccggctcacccccgttcgccctgccgctgcctctcctatagtgagcggt

SEQ ID NO: 148 - DNA, 1461 bp, synthetic construct
  source 1..1461: mol_type = other DNA
gccaccatggattccagcgagaaggctcaaaaaaggaaaatggaagaatccgacgaggaggctgtccaggccaaggttcttagacctctgcgaagctgcgacgaaccattgacgccaccccctcacagcccaacctctatgctccagctgatacacgatcctgtgtccccgcggggaatggtaactcgctcctctccaggcgctggtccttctgatcaccatagcgcgagtcgggacgagcgctttaagaggaggcagcttttgcggctgcaggctaccgagcgcaccatggttagagagaaggagaataatccctctgggaaaaaagagctttctgaggtggaaaaagcaaaaatccgcgggtcctacctcaccgtcactctgcagcggcctaccaaagagttgcacggaacctcaatagtgcccaaacttcaggcaattactgcctcctctgctaatcttagacattcaccccgcgtgctcgtccagcattgccccgcccggactccacagcgcggagatgaggaggggcttggaggcgaggaagaggaagaagaagaagaggaggaagaagacgactctgccgaggagggtggggcagctcggctgaatggcaggggttcatgggcgcaggatggggacgagagctggatgcagagagaggtttggatgagcgtgttccggtatttgagccggagagaattgtgtgagtgcatgagagtgtgtaaaacttggtataagtggtgttgtgataaacgcctgtggaccaaaattgatctcagcagatgcaaagccatagtgcctcaggccttgagcggaattatcaaacgacagcctgtaagcctggatttgtcttggaccaatatttctaaaaagcagctcacgtggcttgtgaatagactgcccgggctgaaagacctcctcctggctgggtgcagctggagcgcagtatcagccctcagtactagctcctgtccactgttgcgcacccttgatttgaggtgggccgtcggcatcaaagacccacagatcagggacctgcttacccctcctgccgataaacccggtcaggataaccgcagtaagctcaggaacatgacggacttcaggcttgccggactcgatataaccgatgcaactctgaggctgatcattcggcatatgcctctcctgtcaaggcttgacctgtcccattgctcccacctgacagaccaatcttccaacttgcttacagcagttggaagttccacgcgctactctctgaccgaattgaacatggccggttgtaataaacttaccgatcagacattgatttatctgcggagaattgcaaatgtaacacttatcgatctgaggggctgtaagcagatcaccaggaaggcctgcgaacatttcatctcagatttgtctattaatagcttgtattgtttgtcagacgagaagcttattcagaaaataagt

SEQ ID NO: 149 - DNA, 1215 bp, synthetic construct
  source 1..1215: mol_type = other DNA
gccaccatgaaccacaaaagcaagaagcgaatacgggaggctaagagatctgccaggcctgaattgaaagactccctggactggacccggcacaactactacgagagcttcagcctttccccggctgctgtggccgataacgtggaacgggcagacgccctccaattgtctgttgaggagtttgtggagcggtatgagcgaccctacaaacccgtggtgctcctgaacgcacaggaagggtggtccgcccaagaaaagtggaccttggaacgattgaaacgcaaatacagaaaccagaaattcaaatgtggcgaagacaacgatggatacagtgtgaagatgaagatgaaatactatattgagtacatggaatcaaccagggatgactccccattgtatattttcgattctagctatggtgaacatccaaagagaagaaaactcctggaagactacaaggtacctaaattcttcacagatgacctgttccagtatgcgggtgagaaaagaagacctccttataggtggtttgttatggggccaccacggtcaggaactggtattcatatcgaccccctgggcacgtctgcctggaacgccctggttcaaggacataagaggtggtgcttgttcccaactagtactcccagggagctcataaaagtgactagagacgagggtggcaaccaacaggacgaggccattacttggttcaatgtcatctaccctcgaacccagctgccaacctggcctccagagttcaaacctctggagatcctgcagaaaccaggtgagactgtgttcgtgccaggcggctggtggcacgttgtgcttaacctcgatacaacaatcgctattacacagaacttcgcctcatcaactaactttccagtggtgtggcacaagacggtcaggggcagacccaagctgagccggaaatggtataggatcctcaagcaggaacatccggagctggcagttctcgctgactctgtcgatttgcaagaaagcacaggaatagctagtgattcctcatccgattcttcatcctccagcagctcctccagctctgacagtgattctgagtgtgagtctggcagtgagggagacggcacggtgcatcgccgaaagaagcggaggacatgctctatggtcggtaacggggatacaacaagccaggatgactgcgtatccaaggaacggtccagtagccgc

SEQ ID NO: 150 - DNA, 2565 bp, synthetic construct
  source 1..2565: mol_type = other DNA
gccaccatgaaaggtgacacccgacaccttaatggcgaggaagatgcaggtggcagagaggacagcatcctggtaaacggcgcctgtagcgaccagagctccgattcacctccaatcctggaggccataaggaccccagaaattagggggcgccgctcaagttccaggctcagcaagagagaggtgtccagtctgctgagctacacacaggatctcactggggatggggatggggaggacggcgacggatccgacacccctgtgatgcctaagctttttcgggagaccagaactaggagcgaaagccccgccgtgcggactcgcaataataatagcgtgtccagccgggaacgccatagacccagccctaggagcacaagaggccgccagggacgcaaccatgtcgacgaatctccagtcgagtttcctgcaactcgctcattgcgcaggcgcgccaccgcatcagcgggaaccccatggccctccccaccttctagctacctgaccatcgatctgaccgatgacactgaggacacccacggtaccccacagtcttcttccactccttatgcgcgattggcccaggactcccagcagggcgggatggagtccccccaagtggaggccgatagtggcgacggagattccagcgagtaccaggacggcaaagagttcggcattggggacctggtttgggggaagatcaaaggattcagttggtggcctgctatggtggtctcttggaaggcaactagcaagaggcaggcgatgagcgggatgaggtgggtgcagtggtttggcgacggaaagttcagtgaggtttcagccgataagctcgttgcgcttggcctgttttcccagcatttcaatttggcgacttttaataagctcgtctcttaccgaaaggcaatgtaccacgcccttgaaaaggccagagtcagggccgggaaaaccttcccttcatctccaggggattctctggaagaccagctgaaaccaatgctggaatgggcacatggtggctttaaacccacaggaattgagggacttaagccaaacaatacccagcccgtcgtaaacaagtccaaggtacggcgcgcaggatcaaggaagctcgagagccgcaaatacgagaacaaaacccgacgcaggactgccgacgatagtgctacgagtgactattgccccgcgccaaaaaggctgaagactaactgctataacaacggtaaagatcggggggacgaagaccagtcacgggagcagatggcatccgatgtcgcaaataacaaatcatctctggaggatggatgtctctcttgtggtagaaaaaatccagtttccttccatccactgtttgaaggaggattgtgtcaaacttgtagggacaggtttctggaactgttctacatgtacgacgatgacgggtaccagagctactgtacagtgtgctgcgaagggcgagagctcctcctctgcagcaatacttcttgctgccgctgcttctgcgttgagtgcctggaagtgctggtgggtactggaactgcggcagaggcaaagctgcaagaaccgtggagctgttatatgtgcctgccccaaaggtgccatggcgtgctcaggcgccggaaagactggaacgttagacttcaggccttttttacctctgacacgggactggagtacgaagctcccaagctgtaccccgccattcccgccgccaggcgaaggccgataagggtcctgtctctgtttgacggcattgctacaggctatctcgtgttgaaggagctgggcataaaagtcggaaaatacgtcgcatcagaggtctgtgaggagtcaattgctgtagggaccgttaaacatgagggcaatattaagtatgtgaacgacgtgcgcaacatcactaagaagaacattgaagaatgggggccattcgaccttgtgatcggtggctctccctgcaatgacctgtctaatgtcaatcctgctcggaaagggctgtatgagggtaccggtcggctgtttttcgagttttatcacttgcttaactatagccgcccaaaagaaggtgatgacagacccttcttctggatgttcgagaacgtcgtggccatgaaggtgggggataagcgcgacatctctaggtttctggagtgtaatcctgtgatgattgacgccattaaagtttctgcggcccatcgagctcggtacttttggggcaatctgcctggaatgaatcggcccgtcatagcgtccaaaaacgacaaactggagctccaggattgtctggaatacaatagaatcgccaagctgaaaaaggtgcaaactatcacaacaaaatccaactccattaaacagggtaagaatcaactgttccctgtggttatgaacggaaaagaggatgtgctgtggtgcacagagctggagaggatctttgggtttcctgtgcattatactgatgtcagcaacatgggaagaggcgcccggcagaaacttttgggccggagttggagcgtgcccgtgatcaggcatctgttcgctccgctgaaagactacttcgcctgcgag

SEQ ID NO: 151 - DNA, 765 bp, synthetic construct
  source 1..765: mol_type = other DNA
gccaccatggaactcgagcagcgagagggtaccatggctgccgtcggctttgaagagttctccgctcccccaggttctgagctggccctcccccctctgttcggcgggcatattctggagtccgagctggagaccgaagtggagttcgtaagtggaggcctgggaggtagtgggctgcgggaaagagacgaagaggaggaggcggctcgcggaagacggaggagacagcgggaactcaataggcggaagtatcaggcactgggtcgacgatgccgcgagattgagcaggtgaacgaacgcgtgctcaacagacttcaccaggtgcagcgcataacccggagactccaacaggaacgccgcttccttatgagggtgctggatagctacggcgatgactatcgggcttctcagttcacaatagtcctggaggacgaggggtcccagggcaccgacgcccccacccccggtaatgccgagaatgaaccaccggaaaaggagactctgagtcccccgagacgcacacccgccccgcctgaacccggttcccctgcgcccggagaggggccatcagggagaaagcgccggagagtccctagggatggcaggcgcgccgggaacgctctgacgccggagctggcccctgtacagatcaaagtggaggaggactttgggtttgaggcagatgaggctctggatagctcctgggtgtcccgcggacccgacaagttgctgccatatccaacattggcctcccccgcaagcgat

SEQ ID NO: 152 - DNA, 2724 bp, synthetic construct
  source 1..2724: mol_type = other DNA
gccaccatgcatagggctgtggatcccccaggtgccagagcggccagagaggcgttcgccttggggggactgtcctgcgcaggcgcttggagttcttgccctccccatcccccaccacgatcagcatggctccccggcggtagatgcagtgcgtcaataggacagccccccctgcccgcccccctgccgccttcccacggttcttccagcgggcacccctctaagccttactacgctcccggggccccgacccctcggccactccacggaaaactcgaaagccttcacgggtgcgtccaggcactgctgagagagcccgctcagcccggcctttgggagcaattgggccagctttatgagtccgaacacgacagtgaggaagccactcgatgctaccacagtgccctgcgctacggagggtcatttgctgaactgggccctcggatagggcggcttcagcaagcccagctttggaactttcacactggaagttgtcagcatagggccaaagtgctgcccccattggagcaggtgtggaatctgctgcatctggagcataaaagaaattacggagcaaagcggggcggtcctccagttaagagggctgctgaaccccctgttgtgcaacctgtgcctccagcagcactgtcaggcccatctggagaggaggggctttctcccggagggaaaagaagaaggggatgcaactccgaacagactgggctgccgccggggctgcctctgccaccccccccactgccaccaccacctcctccccccccgccgcctcccccaccactgccaggcttggctaccagccctccctttcagctgacaaaacctgggctgtggtcaaccctccatggagatgcatggggacctgaacgaaaaggctccgcaccccctgagcgacaggagcagaggcactcccttcctcatccctacccgtaccccgcgcctgcctacactgctcatccccctgggcacagactggtgcccgcagccccacctggtcccgggccacgcccacccggtgcagagtctcacggatgcctgccagctacaagacctcctggctcagaccttagagagtccagagtgcagaggagccggatggattccagtgtttcccccgccgctactactgcctgcgtgccatacgctccttcacgcccccccggtttgcctgggaccactacatcttcctcttcaagtagttctagcaacaccgggctccggggagtggaacccaacccaggcattccaggagccgaccactatcagactccagctctcgaagttagccaccatggccgcctcggcccatcagctcacagctctcgaaagccattcctcggggcccccgccgccacaccacacctgtctctcccgccaggcccctccagcccaccaccgcctccttgccctcggctgttgcgccccccacccccacctgcatggctgaagggacctgcctgccgcgccgctcgcgaggatggcgagattctcgaagagctgttttttggcaccgagggccccccaagaccggcccctccccctctccctcatagggaggggtttctggggccccccgccagtcggttcagtgtcggtacccaggactcacacactcctcctactcctcctacccccaccaccagcagctccaatagcaactccggctctcatagctctagcccagccggacctgtgtctttcccaccacccccttaccttgcacggtctatagatcctctgcctaggcccccttcccccgcccaaaatccccaggaccctcccctggtgcctctcaccctcgccctccctccggcccccccttcctcttgtcaccagaatacaagcggctctttcagaagaccagaatcccctcggcctcgggtgtcctttcctaaaacccccgaggtaggccctggaccaccgcctgggccactgtccaaggcaccacagcctgtaccacctggcgtgggagagctcccagctcgaggaccgcgcctgttcgacttcccacctacccctttggaagaccaattcgaagagcccgcagaatttaaaatcctcccggatgggctggccaatataatgaagatgctcgacgaaagcatcaggaaggaagaggaacagcagcaacatgaggccggtgttgctccccaacctccactgaaagagccatttgcttctcttcagtcaccctttcccactgataccgcaccaacgacaaccgcccctgctgtggctgttacgacaaccactaccactacgaccaccacaactgccacgcaggaggaggagaaaaagccaccacctgccctgcccccgccacctcctcttgccaaattcccaccacccagccagcctcagccgccacccccccctcccccctctcctgcaagtctgttgaagtccctggcctccgtgctggagggccaaaaatactgctacaggggaaccggggctgcagtgtccacgcgacctggcccgctcccaaccacacaatatagcccgggccccccctccggtgcaactgcgcttccgcccacatctgctgctccttctgcacagggatcaccccagccaagcgcttccagtagctcccaattttctactagcggtgggccttgggccagagaacgcagggctggagaggaacctgttcccggccccatgacacccacccaacccccaccacccctttccctgcctcct

SEQ ID NO: 153 - DNA, 2220 bp, synthetic construct
  source 1..2220: mol_type = other DNA
gccaccatggcgagatccgaatccgaggtcctggaggagatctccagggcgtgcgagacccttgtcgagagggttggcaggtccgccaccgatcctgccgatccagtggacacggctgagcctgcagatagcggaactgaacggctgctgccccctgctcaggccaaagaagaagccgggggcgtcgccgccgtgagcggctcttgcaagcgccgccaaaaagagcaccagaaagagcacagaagacacagaagagcatgcaaagattctgtgggcaggaggccccgcgaaggaagggctaaggccaaagctaaggtgccgaaggagaagagcaggagggtcctgggcaacctggacctgcaatcagaagaaatccaggggagggagaagagtagacctgatctgggaggcgcctccaaggcaaagccgcctaccgcaccagcacctcccagcgcccccgccccctctgctcagcccacgcctccgtccgcctccgtaccgggcaaaaaggctcgcgaggaggcccccgggcctcccggagtgtctagagctgacatgctgaagctgagatctctttctgagggcccccctaaagagctcaagattcggttgattaaagtggagagcggggacaaagagacgtttatcgcctccgaggtggaggagcgcagactcaggatggccgatttgaccatcagtcactgcgctgcagacgtggtgagagccagccgaaacgcaaaggtcaaaggtaaatttagagaatcttatctgtcacccgcccagtccgtgaaacccaagatcaatacagaggaaaaactgccccgggagaagctgaatccaccgacccccagtatatatctggagtccaagcgggacgcgttctcccctgttctgttgcagttctgcactgatcctagaaatcctattacggtaatccgaggactggctgggagccttagactgaacctgggcttgttcagtaccaaaaccttggtggaggcaagtggggagcatacggtcgaggtccgaacccaggtacagcagccctccgatgagaactgggacttgacaggaacaaggcaaatctggccatgtgaatctagtcggagccataccacaatcgccaagtacgctcagtaccaggcatcctcttttcaggagtctttgcaggaggagaaggaatccgaggatgaagagtctgaggaaccagactcaacaacaggaacgcctcccagcagcgcccctgatcctaagaaccatcatattatcaagttcgggacaaacattgacctgagtgatgccaaacgctggaagccacaactccaggaactgctgaagctccccgccttcatgcgcgtcacctcaaccgggaacatgctgtctcacgttggccacaccatccttgggatgaacacggttcaactgtacatgaaggtgccgggctccagaaccccaggtcatcaggaaaataataacttttgctccgtgaacatcaatattggcccaggcgactgtgagtggtttgccgttcacgagcattactgggaaacgatcagcgctttctgtgatcgacacggcgttgactatctgacgggatcttggtggcccatcctggacgacctctatgcatctaacatccctgtgtatcgatttgtacagagaccaggcgacctggtgtggatcaatgccggaaccgtacattgggtacaggccaccggctggtgtaataacatagcttggaatgttggtccattgacagcttaccagtaccagcttgcgctcgagagatacgagtggaacgaggtaaagaacgtgaaatctattgttccaatgatacatgtatcttggaacgtagccaggacagtaaaaatcagcgaccccgacctgttcaaaatgatcaagttctgtttgctccagagtatgaaacattgccaggtgcagagagagtcccttgtgcgggcaggcaagaaaattgcctaccagggcagggttaaggatgagcccgcatactattgcaacgaatgtgacgtcgaagtcttcaatatcctcttcgtgactagcgagaacggctctcggaacacctacctcgtacactgtgagggctgtgccaggcggcgatctgccgggcttcaaggtgttgtggtgctcgagcagtacagaaccgaagagctcgcccaagcgtacgacgcattcactctcgcaccagcctcaacctctcgc

SEQ ID NO: 154 - DNA, 2013 bp, synthetic construct
  source 1..2013: mol_type = other DNA
gccaccatggccgccgcggccggtggaggagggccagggacagccgtcggggccacaggaagcggcattgcggcggctgcggctggcctggctgtgtatcgacggaaagatggcggaccagcaaccaagttttgggagagccccgaaacagtgagccagctggattcagtcagggtgtggcttggcaaacactacaaaaagtatgtccacgcagatgccccgactaataagactctggcgggcctggtggtccaactgctgcaatttcaggaagatgcctttggcaaacatgtgacgaaccctgccttcactaagcttccagcaaaatgctttatggactttaaggccggcggggccctgtgtcatattcttggggcggcttacaaatataaaaatgagcagggctggagacgcttcgacctgcagaatcctagtaggatggacagaaacgtcgaaatgttcatgaatatagaaaagacccttgtgcaaaataattgtcttaccagacccaatatctatctgattcccgatatcgacctcaaactcgccaacaaactcaaggacattataaaacggcaccagggaacattcactgatgaaaagtcaaaagccagtcatcatatctatccctactccagcagtcaagacgacgaggagtggctgagaccagtaatgcgcaaagagaaacaggtgttggtccattggggcttttaccccgattcctatgacacctgggtccacagtaatgatgtcgacgcggagatcgaggatccacctattcctgagaaaccctggaaggtgcacgtgaagtggatcctcgacaccgatatcttcaatgagtggatgaatgaggaagattatgaggttgatgagaaccggaagccggtgagttttaggcagcgaatctccacaaaaaacgaggaaccagtccgctctccggagaggcgggataggaaagccagcgccaatgctagaaagaggaagcactcccctagtcctccccctcccacgcccactgaatcacgcaagaagagcggaaagaagggccaggccagcctctatgggaagcggcggtctcagaaagaggaggacgaacaagaggacctcactaaggatatggaggatcccactcccgtccctaatattgaggaggtggtgttgcccaagaatgtcaatctgaaaaaagattctgagaataccccagttaagggcggtaccgttgcggatctggatgagcaggatgaggaaaccgttaccgctggaggcaaggaagacgaagaccccgctaaaggagatcagagcagatcagtcgatttgggcgaggataatgtgaccgagcagacaaaccatataattatcccctcctacgcttcctggtttgactataattgcatccatgtcatagaaagacgggccctgcccgagttcttcaatgggaaaaacaaatcaaagacgccagaaatttacctcgcatatcgcaacttcatgattgacacctacagactcaatccccaggagtatcttacaagtactgcctgtaggcgcaatctgacaggagatgtgtgcgccgtgatgagggtgcacgcctttcttgagcagtggggattggtgaattatcaggtggaccccgagtcacgcccaatggctatgggtcctcctcccacaccccactttaatgtcttggctgacaccccatccggacttgtgcctctccacttgagatccccacaggtgccagcagctcagcaaatgcttaacttccctgagaaaaacaaagagaagccagtggatctgcagaatttcggtcttcgaaccgacatttactccaaaaagacattggccaaatccaagggagccagcgcaggccgcgagtggacagaacaggagaccctgctgcttctggaggcactggagatgtacaaagatgactggaacaaagtctctgagcacgtgggatcccggactcaagacgagtgtatactgcatttccttcggctgcccattgaggaccca

SEQ ID NO: 155 - DNA, 1980 bp, synthetic construct
  source 1..1980: mol_type = other DNA
gccaccatgatcattattccgagctatgcttcctggttcgactacaattgcattcatgtcattgaaagacgggccctccccgagttctttaatggtaagaataagagtaaaacccctgagatctatctcgcctatcgaaattttatgattgacacttatcgcctcaaccctcaagaatatttgaccagcacggcctgccgccggaatttgaccggcgacgtgtgcgcagtaatgagggtccacgccttcctggagcagtgggggttggtgaactatcaggtcgatcccgagagccggccaatggctatgggccctcctcctactcctcactttaatgtgctggcggacacccccagcggactcgtgccactgcatctgcggagcccccaagtcccggctgcccagcagatgttgaattttcctgagaagaataaggagaaaccagtggatcttcagaattttggcctgagaactgacatttactctaaaaagaccctggccaaaagtaagggggcttccgcaggacgggagtggaccgagcaagaaactcttctcctgctggaagcactcgagatgtataaggatgactggaataaagtctctgaacatgtaggttcacggacccaggacgagtgcatcctgcactttctgcgcctcccaatcgaggatccataccttgaaaactcagacgcgtcacttggacctctcgcgtatcagcctgtgccgttctctcaaagcggcaaccccgtgatgtccaccgtcgcatttctggcgtccgtggttgacccccgggtcgcttccgccgctgccaaagcggctctggaagaattcagccgagtgagagaggaggttcccctggaattggtggaggcccacgtgaaaaaggtgcaggaggctgctagagcatccggaaaagtcgatccaacatacggtctcgagagcagctgtattgccggtacagggcctgatgaacccgagaagttggaaggagcagaggaggaaaagatggaggcagacccagatggtcagcagcctgagaaggccgaaaacaaagttgagaacgaaacagacgagggcgacaaggcacaggatggtgagaatgaaaagaatagcgaaaaggaacaagattctgaggtctctgaagacactaaaagcgaggaaaaggagacagaggaaaacaaagaattgacggacacctgcaaagagcgagagagcgacacaggtaagaaaaaagtcgaacatgaaatctccgagggtaacgtggctaccgccgcggccgcagctctggcaagcgccgcgactaaagctaaacacctggctgccgtggaggagcgcaaaataaagagtctggttgccctgttggttgagacccagatgaagaagcttgaaattaaactcaggcacttcgaggagctggaaacgatcatggacagggagaaggaggctctcgagcagcagcgacagcaactcttgactgaacggcagaattttcacatggaacagctgaaatacgccgaactcagagctagacaacagatggaacaacagcagcacggccagaatccacagcaggcccaccagcatagcgggggacccggcctggcgcctttgggagccgccggacatcccggcatgatgccacatcagcagccaccaccttacccactcatgcaccatcaaatgccacctcctcacccgccccaaccagggcagatacctgggccaggctccatgatgcccggccagcatatgcctggaagaatgatccctacagtggccgccaacatccacccttcaggatccggcccaacacctcccggtatgccacctatgcctgggaacatactggggcctagagtgcctctgaccgctcccaatggcatgtacccgcctccaccgcagcagcagccacctccaccaccacccgccgatggtgtcccgccccccccagcccctgggccccctgccagtgccgctcca

SEQ ID NO: 156 - DNA, 2196 bp, synthetic construct
  source 1..2196: mol_type = other DNA
gccaccatgggttctgaagatcacggcgcacaaaacccatcttgtaaaattatgacctttcgccccaccatggaggaattcaaggactttaataagtacgtggcctatattgagagccagggcgctcacagagccggcctcgcaaagatcattccacctaaggagtggaagcctcgacagacatacgacgacatcgatgatgttgtaatccccgcaccaatccaacaggttgtaacagggcagtccggcctgtttacccaatataatatccagaagaaggccatgaccgtgggagaatacaggagactcgccaactctgagaagtactgcacaccacgccatcaagactttgatgacctggaaaggaagtattggaaaaacctcaccttcgtgagcccaatttacggtgcagatatcagcggatccctctacgatgacgacgttgcccagtggaatattggctctctccggactatactggacatggtcgagcgcgagtgtggcacgatcatcgagggggtcaatacgccatacctgtacttcggtatgtggaagaccacttttgcatggcacactgaagatatggacctttacagcattaattacctgcatttcggggagccaaagtcctggtatgcgattcctcctgaacacgggaagagactggaacgcttggctataggcttctttccaggttcttctcaaggatgcgatgccttcctgcgacacaagatgaccctcatcagccccatcattctgaaaaagtatgggatcccttttagcagaattacccaagaggcaggagagtttatgataacctttccgtacggctatcatgctggcttcaatcacgggttcaactgtgcggagtccaccaatttcgctacattgaggtggatcgactacgggaaggtggctacgcagtgtacttgtagaaaggacatggtgaagattagcatggacgtgtttgtcaggattcttcagcccgaaaggtacgaactttggaagcaggggaaagatctgactgttttggatcatacacgcccaactgccttgacaagtccagaactctcatcttggtccgccagccgcgctagtctgaaggcaaagctgttgaggaggagtcacaggaagaggagtcagccaaaaaagccaaaaccagaagatccaaaatttcctggagaaggaaccgccggcgctgctcttttggaagaggccggtggatccgtgaaggaggaggcagggcccgaggtcgaccccgaggaagaagaggaagaaccacagccactgcctcacggccgcgaggctgaaggggccgaggaggacggccgcggcaaacttcgccccacgaaggcaaagtctgagagaaagaagaagtcctttggcctgttgcctccacagctgcctcctccccctgcccacttcccctcagaggaggcgctctggctgccctcaccactggagccaccagtgctggggcctggtccagccgccatggaagagagcccactcccagctcccctgaatgtcgtaccccccgaggtcccatccgaggagctcgaagcaaagccccggcctattatccctatgctgtacgtggtcccgcgacccggaaaggcagcttttaaccaggaacatgtaagttgtcagcaggcattcgaacacttcgcccaaaagggcccaacttggaaagaaccagtctccccgatggagctgaccggtcctgaggacggagccgcttccagtggggctggcaggatggaaactaaagctagagcgggcgaaggccaggctccaagtacattctcaaaactgaaaatggaaatcaagaagagccggcggcacccgctgggccgcccccccacacgcagtccactttccgtcgtgaaacaggaggcctcatcagacgaggaggctagccctttctccggcgaggaagacgtctctgaccctgatgcgcttagacccttgctgtcactgcagtggaagaaccgcgctgcaagctttcaggctgagcgcaagtttaacgcagccgcagcccgcactgaaccgtactgtgccatatgtactttgttctatccctactgtcaagcgcttcaaacagagaaggaggctcctatcgcatccctgggtaaagggtgcccggcaacccttccctccaagtcccggcagaagaccaggccgctgatccctgaa

SEQ ID NO: 157 - DNA, 1989 bp, synthetic construct
  source 1..1989: mol_type = other DNA
gccaccatgaaatcctgtgctgtctccctgaccactgcggccgttgccttcggtgatgaggcgaaaaagatggccgagggcaaagctagtcgcgagagcgaagaggaaagcgtgtcactcaccgtggaagagcgcgaggctcttggcgggatggatagcaggcttttcggattcgtcaggctccacgaggacggagccagaaccaaaacattgctcgggaaagctgttagatgttatgaaagcttgatcttgaaggccgagggaaaagtggagagcgacttcttttgccagctgggacacttcaacttgctgctggaggattactccaaggccctcagtgcttaccagagatattattctcttcaggctgactattggaaaaatgctgccttcttgtatggcctgggactcgtgtatttctactataatgcattccactgggccattaaggcattccaggatgtgctgtacgtagacccctccttctgcagggcgaaggagatacacctgcgcctgggtctcatgtttaaagtgaacacagattacaagtcctcccttaagcactttcaactggccctgatagattgtaacccttgtaccttgtctaacgcagaaattcagttccatatcgcacatctgtacgagacacaacgcaagtatcactctgcaaaagaagcatatgagcaactcttgcagacagagaatctgcccgcccaagtcaaggctacagtcctgcagcagctcggctggatgcaccacaacatggatctcgtgggggacaaagcaacaaaagaatcttatgcaatccagtatctgcagaagtccctcgaggcagatccaaactcaggccagagttggtattttctgggaaggtgctactcctcaattgggaaggtgcaggacgcttttatttcttatcgacagagcattgataagagcgaagccagcgctgacacctggtgttctatcggggtcctttatcagcaacagaaccagcctatggacgcgctgcaggcttatatctgcgccgttcagcttgatcacggccacgcagccgcctggatggaccttgggacactctatgaaagttgtaaccagccacaggatgcgattaagtgctaccttaacgccgcacgcagtaaaaggtgtagcaacacttccacgctggccgctcggatcaagtttcttcagaatggctctgataattggaatggagggcagagtctcagccatcaccctgtgcagcaggtttattctctctgtctgaccccccagaagttgcagcatctggagcagctgcgcgcgaacagggataacctgaacccagcccagaagcatcagttggaacagctcgagtctcaattcgtattgatgcagcaaatgcgacacaaggaggtggctcaagtgcgcactaccggcatccacaacggcgccatcaccgactccagcctgccaacaaatagcgtgtccaatagacagccacacggcgccctcactagggtgagctccgttagccaacctggggtaaggcccgcatgcgtcgagaaattgctgtcttccggagctttttccgctggctgtattccctgtggaaccagtaagatcctgggctcaaccgatacaatcctgcttggctccaactgcattgctggcagcgagtctaacgggaacgtcccctatctccaacagaatactcatacgctgcctcacaaccacactgaccttaactcttctacggaggaaccctggcggaagcaattgtcaaattcagcgcagggcttgcacaaaagccagtctagttgccttagcggcccaaacgaagagcagccactgttcagcacaggaagcgcacagtaccaccaggctactagcactggcataaaaaaggcgaatgagcatctcactctgccatctaattccgtccctcagggtgacgccgattcacatctcagttgtcatacagcaacttcaggcggacagcagggaatc

SEQ ID NO: 158 - DNA, 2064 bp, synthetic construct
  source 1..2064: mol_type = other DNA
gccaccatgtttacaaaggagtccaaaccttcaaaaaacaggagccttgtgcctgagacctccaggcacaccggtgatacttccaatggatgcgcagatgttaagggcctgtctaatcatgttcaccagctgattgcggatgctgtgagttcccccaatcacggtgactctcctaacttgctgatcgccgataatcctcagctgagcgcactgctcattggtaaggctaacggtaacgtgggcacgggcacgtgcgataaggtcaacaatatccaccctgccgtgcacactaagactgaccactccgttgcctccagccctagctcagcaattagcaccgccacccctagccccaaatcaacagaacagaggagtatcaattccgtgacgtctctgaattctccccactccggcctgcataccgttaacggcgagggtctgggaaaatcccagagttccactaaggtcgatttgcccttggcctctcacaggtccacctcccagatcctccctagcatgtcagtatctatttgcccgagtagcacagaagtgctcaaagcatgcagaaatccggggaaaaacgggctctccaattcatgtattctgctggacaaatgtcctccccccagaccccccacttcaccctatcctcccttgccaaaagacaagctgaatccacctacaccctctatctatctggagaataagcgggatgcctttttcccacctcttcaccagttttgcacaaaccccaaaaaccccgtcactgtcatacggggactggctggagctttgaaactcgatcttggtctgttcagcacaaaaacactcgtcgaggctaacaacgagcatatggtggaggttcgaacacagctgctgcaacctgccgatgagaactgggatcctacaggcacaaagaaaatatggagatgcgagtctaataggtcacacacaacaatcgcaaagtacgcgcagtaccaagcatctagttttcaggagagcttgcgcgaagaaaacgagaaaaggacacagcacaaggaccattcagacaatgagtccacatcttccgagaacagcggtagacgcagaaagggccccttcaaaactattaagttcgggacaaatattgacttgtctgacaacaaaaagtggaaattgcagctgcatgagttgaccaagcttcctgcctttgcacgagtggtatccgcgggaaacctcttgacacatgtgggacatactatactgggaatgaacaccgtgcagctgtacatgaaggtccccgggtcccgcacccctgggcaccaggagaacaataatttctgcagcgtgaatattaacatcgggcccggggactgtgagtggttcgtggtgcccgaggactattggggagtgctgaacgatttctgtgaaaaaaataacttgaatttcctgatgagttcttggtggcccaaccttgaagatctctatgaggcgaacgtgcctgtgtatcgcttcattcagcggcctggtgaccttgtttggataaatgccggaacagtgcactgggtccaagctgtggggtggtgtaacaacattgcttggaatgtagggcctttgaccgcctgtcagtacaagttggcagtggagagatatgagtggaacaagctgaaaagcgttaagagtcctgtgccaatggtccacctttcctggaacatggcccgcaatattaaagtgtcagaccccaagctgttcgagatgattaagtactgtctgctgaagattcttaagcagtaccagacactgcgcgaagcattggtcgctgcgggaaaggaagtgatatggcacggccgcaccaacgatgaaccggctcactactgttctatatgcgaggtcgaggtgttcaatctcttgtttgttaccaatgaatcaaatacccagaaaacgtacatcgtccactgtcacgactgtgccaggaaaacaagcaagagtctcgagaactttgtggttcttgagcaatacaagatggaagacctcatccaggtgtacgaccaattcactttggccctcagcctgtctagctcttcc

SEQ ID NO: 159 - DNA, 2130 bp, synthetic construct
  source 1..2130: mol_type = other DNA
gccaccatggcatctgagtcagaaaccctgaacccatcagctcggatcatgactttctacccaacaatggaggaatttcgcaatttttcccggtatatcgcttatatcgagtctcagggcgcgcatagggccggcctcgcgaaggtggttccaccaaaggagtggaagcctcgggcttcttatgacgacatagatgacctggtcataccagctccaattcagcagctggtgacaggtcagtctggcctcttcactcaatacaatattcaaaaaaaagctatgaccgttagggagtttcggaaaattgctaattcagataagtactgcactcctagatactccgagttcgaagaactcgagcggaaatactggaagaaccttaccttcaatccccctatctatggcgccgatgtgaatgggactctttacgagaaacacgtcgatgagtggaatatcggaaggcttagaactatcctggatctggtggaaaaggagagcggtattacaattgagggcgtaaacactccctatctgtattttgggatgtggaaaacttcctttgcatggcacacggaagacatggacctttactctataaattacctgcattttggcgaacctaaaagctggtactcagtcccacccgagcatggtaagaggctggagcggctcgctaaaggtttttttccgggatctgctcagagctgtgaggcattcttgcggcacaaaatgaccttgattagccctcttatgctgaaaaaatacgggatcccctttgacaaagttacccaggaggctggcgagtttatgattacctttccctatgggtatcatgccggcttcaaccacggcttcaactgcgcagaatctacaaactttgcgacccgcaggtggatcgagtacggtaagcaggccgtgctttgttcttgcagaaaggatatggtcaaaatctctatggacgtgtttgtgagaaaattccaacccgagaggtataaactgtggaaggccgggaaagacaatactgttattgaccataccctgcccactcccgaggctgcagagttcctgaaagagtctgagctcccaccgagagccgggaacgaggaagagtgtccagaagaggacatggaaggtgtggaggatggggaggagggggatctgaaaacttctctcgccaaacacagaatagggaccaaacgacaccgggtgtgcttggaaatcccccaggaggtcagccagagcgagctctttcctaaggaagatttgagtagcgaacaatacgagatgacagaatgcccagcagctctcgccccagtcaggccaacacactccagtgtcaggcaagttgaggacggtctcaccttcccagattactccgacagcacagaggttaagtttgaggagctcaagaacgttaagctggaggaggaagacgaggaggaagaacaagcggccgcagccctggatctgagtgtgaatcccgccagtgtggggggccggctcgtgttcagcggatccaagaagaaatcctcatcctctctggggagtgggagctccagggacagcatttcctctgactccgagacaagtgaacccctctcctgcagggcccaaggccagaccggagtgcttaccgtgcatagttatgctaaaggagatgggagagtgacagttggagagccttgcacccggaagaaaggtagcgcagctagatccttcagcgagcgagagcttgccgaggttgccgatgagtacatgtttagcctggaggaaaataagaaaagcaaaggtagaaggcagcctctctcaaaactgcctcggcaccacccccttgtactgcaggagtgtgtgtctgatgatgagacaagcgaacagctgactccagaagaggaggctgaggagactgaggcatgggcaaagccactgagccagctctggcaaaaccggcctcccaacttcgaagccgaaaaggagtttaacgagaccatggcgcagcaggcaccccattgtgccgtgtgcatgatttttcagacataccatcaggtcgagttcggagggttcaatcagaactgtggcaacgcatctgatctggcgccacagaagcagcgaaccaaaccccttataccggaa

SEQ ID NO: 160 - DNA, 2106 bp, synthetic construct
  source 1..2106: mol_type = other DNA
gccaccatggacttttctttttctttcatgcagggaatcatggggaataccatacaacaacccccccagctgatcgacagcgctaacattaggcaggaagatgcattcgacaataactccgacattgcagaggacgggggccagaccccatacgaggcaactctgcagcagggctttcagtacccggctacaacagaggacttgccccctttgacaaacggctatcccagctccatcagtgtgtacgaaacacaaacgaaataccaaagctacaatcaataccccaatggctccgccaacggatttggggctgttcggaatttttctccaactgattactatcattccgaaattccaaacactaggccccatgagattctcgaaaaacctagtcccccgcagcctcctccgccgccctccgtgccccagacagttattcctaaaaagactggctcaccagagataaagcttaagattactaagactattcagaatgggcgcgaactgttcgagtcctcactgtgtggggatctgctcaatgaagtgcaggcgtccgagcacacgaagtccaaacatgagtcccggaaggaaaaaaggaaaaagagcaataaacacgactcatctcgctcagaagaaagaaaatcccacaagatacccaagctggaaccagaagaacagaacaggcccaatgaacgcgtggataccgtgtccgagaaaccccgcgaagagcccgtgctcaaggaggaggcgcctgtgcaaccaatcctctcttccgtacctactacagaggtgagcaccggggtgaaatttcaggttggagatcttgtgtggagcaaggtgggaacctatccctggtggccctgtatggtgtcctccgacccgcagctggaagtccacactaaaataaatactaggggggcccgcgaatatcacgtgcaatttttttccaatcagcccgagagagcctgggtgcacgagaaaagagtgcgcgagtacaagggccacaaacagtatgaggaacttctggctgaggccactaagcaggcttctaaccattcagaaaaacaaaagatcagaaagccacggcctcagagagagcgcgcgcagtgggatatcgggatcgcacacgcagagaaagctttgaaaatgacaagagaggaacggattgaacagtatacgttcatatacattgataaacagcccgaggaggctctgtcccaggctaagaagtctgtagcctctaagacagaagtaaaaaaaacacggcggcccaggagcgttcttaatacacagccggagcagacgaacgccggggaagtggcatctagtctctccagtacagagataaggcgccatagccagcggagacatacctccgccgaagaggaggagccaccacccgttaagattgcatggaaaactgcggcagcccgaaaatcactgcccgcttcaataaccatgcataagggttcactcgatctgcagaaatgcaatatgagtcctgtcgtcaaaatagaacaggtattcgcactgcagaacgcaacaggtgatgggaagttcattgaccagtttgtctatagcactaaggggattggtaacaagacagagatatccgttagaggccaggatagactcattatcagtactccaaaccagaggaatgagaaacccactcagtccgtatccagcccagaggccacctctgggtctaccggatctgtggagaaaaagcagcaacgacggagcatccgaactaggagcgagagcgagaagtctaccgaagtcgtgcctaagaagaagattaaaaaggagcaggtggagaccgttccgcaggccaccgtcaagacggggctgcagaagggcgcctctgagatctcagactcatgtaagcctctcaagaagcgctctcgcgcatccactgatgtcgaaatgacttctagcgcctatagggacacaagtgatagcgactctcgcgggctgagtgacctgcaggtcgggtttggaaagcaggttgattctcccagtgccacagctgatgctgatgtctcagacgtccagtccatggactcaagcctctccaggaggggcacggggatgagtaagaaa

SEQ ID NO: 161 - DNA, 1455 bp, synthetic construct
  source 1..1455: mol_type = other DNA
gccaccatgaagaaactgcactacaagcagatcgtgtgggttaagctgggaaattataggtggtggcctgcggagatttgtaaccctagaagcgtccccctgaacattcagggcctcaaacacgacttgggcgactttccagtgtttttttttgggtctcacgactactattgggtacaccaaggccgagtgtttccctacgtggaaggtgacaagtcattcgccgagggacaaacatcaatcaataagacgttcaaaaaggctttggaagaagctgcaaagagattccaagaactgaaagcccagagagagtcaaaggaagcccttgagatcgagaagaattccaggaagccgccgccctataagcatatcaaggctaacaaagtgatcgggaaagtgcagatccaggtggccgacctctccgaaatcccgcgatgtaattgcaaacccgctgacgaaaacccctgcggactggaaagcgaatgcctgaatcggatgcttcagtacgagtgccatccgcaggtttgtccagcgggcgacaggtgccaaaatcagtgctttaccaagcggttgtacccagatgccgaaatcattaagacggaacggcggggatggggcctcagaaccaagcggtcaattaaaaaaggagaattcgttaatgagtatgttggagagctgattgatgaagaagaatgcagactccgcatcaaacgggcccatgaaaactctgtgaccaacttttacatgctgacggttactaaagacagaattatcgatgcaggtcctaagggtaattacagccgattcatgaaccattcatgtaacccaaattgcgagacgcagaagtggaccgtgaacggagacgtgcgcgtgggcctgttcgctctctgtgatattccagccggtatggagctgaccttcaattacaatctggattgtctgggtaacggtcggaccgaatgtcactgcggcgctgacaactgctctggcttcctgggcgtccgacccaaatctgcttgcgcttccaccaacgaggaaaaggccaagaacgctaagctgaaacaaaagcgccggaagataaaaacagaacccaagcagatgcatgaagattactgtttccagtgtggagatgggggcgaactcgtgatgtgtgataaaaaggattgtcctaaggcataccacttgttgtgcttgaacctgactcaacccccctacggcaagtgggagtgcccgtggcaccagtgtgatgagtgcagttctgcggctgtgtccttctgtgagttttgccctcacagtttttgcaaagatcatgagaagggcgccttggtgccatcagcattggagggtagactctgctgttccgagcacgaccctatggcacctgtttcccctgaatattggagtaagataaaatgcaaatgggaatcccaggaccacggcgaggaagtcaaggag

SEQ ID NO: 162 - DNA, 678 bp, synthetic construct
  source 1..678: mol_type = other DNA
gccaccatgaagaggctgctgccttcagtttggtcagagtctgaggatggagcaggctcacctcctccttatcgaagaaggaagagacccagtagcgctcgccggcaccatctgggacctactcttaagccaaccctggcgacccgaacggcacagccagaccacacacaagcgcccaccaagcaggaggccggcggaggtttcgtgttgccacccccggggacagacctggttttcctccgggaaggggctagttcccccgtgcaagtgcccggcccagtcgcagcctcaaccgaggccctgttgcaagaagctcagtgtagcggcctgtcctgggtggtggccctgccccaggtcaaacaggagaaggccgatacgcaggatgagtggactccaggcactgctgttctcacaagcccagttctggtacctgggtgcccatcaaaagccgtggatccaggcctgccttctgtcaagcaggaaccgccagaccccgaagaggataaggaggagaacaaggatgactctgcttccaagctggccccagaggaagaggcaggaggagccggtaccccagtgattaccgaaatattttctctcggcggcacccgcttcagggacaccgccgtgtggctgccccgaagcaaagacctgaaaaagcccggagcgagaaagcag

SEQ ID NO: 163 - DNA, 1047 bp, synthetic construct
  source 1..1047: mol_type = other DNA
gccaccatgttgcacacaacacagctgtaccaacatgtccccgaaacacgctggcccatagtgtactccccgcggtacaatattaccttcatggggctggagaagttgcatcccttcgatgctggaaaatggggaaaagtgatcaatttccttaaggaagagaaattgctctcagactcaatgttggtggaggctagggaagcttccgaggaggacctgctggtggtgcataccagacgatacctgaacgagctgaagtggtcttttgccgtggccaccatcactgagattccccctgtgattttcttgccgaatttccttgtgcagcgaaaggtgctgcgccctctgcggacacagacgggtgggaccataatggccggtaagctcgccgtggaacgcggatgggcaatcaacgttggcggcggctttcatcattgctccagcgaccgcggtggagggttctgtgcctatgccgacatcaccctggcaatcaagttcctttttgaaagggtggaagggatatctagggctacaattattgatcttgacgcgcatcaggggaacgggcacgagcgagacttcatggatgataagcgggtttatatcatggatgtatacaaccggcacatctacccaggtgatcgatttgccaagcaagccattcgcagaaaagtcgagctcgagtgggggaccgaggatgatgagtacctggataaagtcgagcgcaacatcaaaaaatccctgcaggagcaccttccagatgtggtcgtgtataacgcagggaccgacatcctggaaggggatcgcctgggaggcctgtccatctctcctgcaggtatagtgaagcgagacgagcttgtttttagaatggttcgggggcgacgggtgcccatcctgatggttaccagcggggggtaccaaaagcgcactgctcgcatcatcgctgactctattcttaacctgttcggcctgggccttattggccctgagagtccatccgtgtctgcccaaaactccgatacccctctgctccctcctgctgtgcca

SEQ ID NO: 164 - DNA, 1206 bp, synthetic construct
  source 1..1206: mol_type = other DNA
gccaccatggctgccgggggactgagtcgatctgagagaaaagctgccgaaagggttagaagactccgcgaagaacagcagcgggaaaggctgaggcaagtgagtcgcattctgagaaaagcagcggctgaaaggagcgccgaggaaggcaggctcctcgccgagtccgcagacctggtcaccgaactgcagggacgaagtcgcagacgggaggggcttaagcgaagacaggaagaggtgtgcgacgatcccgaagagctgcgcggcaaagtgagggaattggcaagcgccgttaggaatgctaagtacctcgtggtgtacaccggggctggcatttctactgccgcgtcaattccagactacaggggccctaacggagtttggacacttctgcagaaggggcgctccgtgtcagccgccgacctttctgaggccgagccaacactcacacacatgtccattacaaggctgcacgaacagaaactggttcagcacgtcgtgtcccaaaattgtgacggccttcacctccgctcaggactccctcggacagccatttccgaactgcatggcaatatgtatatcgaagtttgtacgagctgtgttcccaaccgggagtacgtgcgggttttcgacgttacagaacgaactgcacttcaccgccaccaaacggggaggacctgccacaaatgtggtacccaacttcgagatacgatcgtccactttggcgagcgcgggacacttggccagcctctgaactgggaggcggcaaccgaggccgcgagccgcgccgacacgattttgtgtctcggttccagcctcaaggttttgaagaagtaccccaggctgtggtgtatgaccaaaccaccatcacgaaggcccaaactttatatcgtgaacttgcagtggactccaaaagatgattgggccgccctgaagctgcatggcaagtgtgacgatgtgatgaggttgttgatggccgaactgggacttgaaattcctgcctattcaaggtggcaggatcccatcttctctctggccactccccttcgggccggtgaagagggcagccacagcagaaaatcactgtgccggagtagagaagaggcaccacctggcgaccgaggagccccactgagtagcgcgccaattctgggtggctggttcgggcgaggatgtactaagcgcactaagcgcaaaaaagtgaca

SEQ ID NO: 165 - DNA, 1626 bp, synthetic construct
  source 1..1626: mol_type = other DNA
gccaccatggcaagccaggagttcgaggtggaagcaattgtcgacaaacgccaggataagaacggaaacacgcaatacctggtgaggtggaaaggttatgataaacaggacgacacatgggagcccgaacaacacctgatgaattgcgagaaatgtgtccatgattttaatagacgccagaccgagaaacagaagaagctgacctggactaccacctctaggattttctccaataacgcgcgcaggagaacatctagatccaccaaggccaattactccaagaactccccaaagacccccgttactgacaagcatcacaggtccaaaaatcggaagctgtttgctgcctccaagaacgtgagacgcaaggctgcaagtatactgtctgacacaaagaatatggaaatcataaactccactattgagacattggctccagatagtccgttcgaccataagaccgtgagtggatttcagaagttggagaagttggaccccattgcagccgatcagcaggacactgtagtatttaaagtcacggaagggaaactgctcagagaccccctctcccggcctggggccgagcagacggggattcagaacaagactcaaatccatcccttgatgagtcagatgagcgggagcgtgacagcaagcatggcaaccggctcagccacacggaaaggcatcgtggtcctcatagacccgttggccgccaacgggacaacagatatgcacacctccgtcccacgagtgaagggcggacagcgaaacatcaccgacgacagtagagaccagccctttatcaaaaagatgcattttactattagattgaccgagagcgcatctacatacagggacatcgtcgttaagaaggaggatggctttacgcagatcgtactgagcaccagaagcactgaaaaaaacgctctgaacactgaagtgataaaagagattgttaacgccctcaatagcgccgcagctgacgattctaagctggtgctcttctctgccgcaggttccgtcttctgttgtggtctggactttggctacttcgtcaagcatcttaggaacaatcggaacacagcctcactggagatggtagataccatcaagaatttcgtaaacactttcatccagtttaaaaaacccatcgttgtgtcagtgaacggccctgcaatcggactcggggccagcattctgcccctttgtgatctcgtatgggcaaatgagaaggcatggttccagaccccgtataccaccttcggccagagtcccgacggatgttcctcaatcacctttcctaaaatgatgggcaaggcgagcgcaaatgagatgctgattgcaggaaggaaactgacggccagagaggcttgcgcaaaaggcctggtatcccaagtgttcttgactggcacctttacgcaggaggtcatgatccagattaaggagctggcctcatacaatcctatagtcctggaagagtgtaaggccctggtacgctgtaatatcaaactcgagctggagcaggccaatgagcgagagtgcgaggtgctgcgcaagatctggtcatctgcccagggaattgagtccatgcttaaatacgtggagaataagattgatgaattc

SEQ ID NO: 166 - DNA, 1185 bp, synthetic construct
  source 1..1185: mol_type = other DNA
gccaccatgtgtaaggtcagagcccagagtcgggataaacagattgaagaaagaatgttgtcacacaggcaggacgataataacaggcacgctactaggcaccaagcacctaccgagcggcagctcagatataaagagaaggttgccgagctgcgaaagaagagaaatagtggtctgagcaaagaacaaaaggagaagtacatggagcacaggcagacgtacgggaatactcgcgagccattgctggagaacctgacgtcagaatacgatttggacctcttcagacgagcgcaggctcgggcctccgaggacctcgagaaacttcgcctccagggacaaattacagagggcagtaacatgattaagactattgcttttgggaggtacgagcttgatacatggtaccatagcccttacccagaggagtacgcccgactcggaagactgtacatgtgcgaattttgcttgaaatatatgaaatcccaaacaatcctgaggagacatatggccaaatgtgtgtggaagcatccgccaggagatgagatctaccggaaagggagcatcagcgtgttcgaggtcgatggaaaaaaaaacaagatctactgccagaatctgtgtctgttggctaaactttttctggatcacaaaaccctgtactacgacgttgaacctttcctcttctacgtgatgaccgaggccgacaataccggctgtcatctgattgggtacttcagcaaagagaaaaatagcttcctgaattataacgtctcctgcatcctcaccatgccacaatatatgagacagggctacggcaaaatgctcatagacttctcttacctcttgtccaaggtggaggagaaggtggggtcccccgagaggcctctcagcgacctgggactgatcagctatcgcagctactggaaagaagtattgttgaggtacctgcataatttccagggcaaagaaatcagcataaaggaaattagccaagagacggcagtgaatccagttgatattgtgtctaccctccaggccctgcaaatgctcaagtactggaagggcaaacacctggtccttaagcgacaggatctcattgatgaatggattgctaaagaagcaaagaggtcaaactctaacaagacaatggatccgagctgtctcaagtggaccccacccaaaggaact

SEQ ID NO: 167 - DNA, 1362 bp, synthetic construct
  source 1..1362: mol_type = other DNA
gccaccatggagttctcaataaagcagtcacccctgtctgtgcagtctgtggtgaaatgtatcaagatgaagcaagctcccgagatcctgggcagcgctaatggcaagacccctagctgtgaagtcaaccgagagtgctctgttttcctctccaaggcccagctgtcctcttcacttcaggagggcgtcatgcaaaaattcaatggacacgatgccctgcccttcatccctgccgataaactgaaggaccttacctcacgcgtgttcaatggcgagcccggagctcatgacgccaaattgcgatttgagtcccaggaaatgaagggcataggaacgccacctaatacgacacccatcaaaaacggctcacccgagatcaagttgaaaatcaccaagacatacatgaatggaaagcctctgttcgaaagttccatctgtggggacagcgcagctgacgtcagccagtcagaggagaatggccaaaaaccagaaaataaggcacgcagaaacagaaagagatctatcaaatatgactcattgctcgaacagggcctcgtggaagccgccctcgtgtcaaagatcagctccccttcagacaaaaagataccagccaaaaaagaaagctgcccaaatacgggcagagataaagaccacttgctgaagtacaatgtgggagatctggtctggtcaaaggtaagcgggtatccttggtggccgtgtatggtgtccgctgacccgctgctgcatagctacacaaagctgaaggggcaaaagaagtctgcccggcagtatcatgtgcagttttttggcgacgcccccgagagggcttggatttttgagaagtcccttgtggccttcgagggagaaggacaattcgagaagctttgccaggagagcgctaagcaggcccccactaaggccgagaaaatcaagctgctgaaacccataagcggcaaactcagagcccagtgggagatgggtatcgtgcaagcggaggaggccgcttcaatgtcagtggaagagcgaaaagcaaaatttacctttctgtatgttggagaccaactccacctgaatccccaggttgccaaggaggctgggatcgcagccgaatcattgggggaaatggctgagtctagtggtgtgagcgaagaggccgccgaaaatcccaagtcagtgcgagaagaatgtatacctatgaagcgcagacgccgagccaaactttgttctagcgctgagacactggagtctcatcctgacattggcaaaagcactccacagaagactgccgaggcagacccaagacggggcgtggggagccctccaggcaggaaaaagactaccgtgagtatgcccaggagcagg

SEQ ID NO: 168 - DNA, 1479 bp, synthetic construct
  source 1..1479: mol_type = other DNA
gccaccatgaagaagcttcacttccaagatatcatctgggtgaagctgggaaattatcggtggtggccagctgaggtttgccacccgaagaatgttcctccgaacatacagaaaatgaagcacgagataggtgaattcccagtattcttctttggcagcaaggactactattggactcatcaggccagagtgttcccatatatggaaggcgaccggggaagtcggtatcagggtgtgcgcggaatcgggagggttttcaagaacgccctgcaggaggccgaggcgagatttagagaaatcaaactccagagagaagcaagagagactcaggagagcgagagaaagcccccaccatataagcacattaaggtgaataaaccgtacggtaaggtgcaaatttacactgctgacatcagcgaaatccctaagtgcaattgcaaacccactgatgagaacccatgtggctttgactcagagtgccttaataggatgttgatgttcgagtgtcacccgcaggtttgcccagcaggagagttttgtcagaaccagtgctttacaaaaagacagtatcccgaaaccaaaatcatcaagactgacggaaaagggtggggtctggttgctaagagggatatccgcaaaggcgagtttgttaacgaatacgtgggcgagttgatagacgaagaggaatgcatggccagaatcaaacatgcacatgaaaacgacatcactcatttttacatgctcacaattgataaagacagaatcatagatgctggccctaagggtaactatagcagatttatgaaccattcctgccagcctaattgtgagacactgaaatggaccgtgaacggggacacccgcgtcggcctcttcgccgtctgcgatatccccgctgggacggagttgacttttaactacaatttggactgcctgggtaacgaaaaaacggtttgtcggtgtggtgcgtccaattgctcaggcttcctcggagataggcccaagacctccacaacccttagcagtgaggagaaggggaagaaaactaagaagaaaacccgccggaggagggctaaaggtgagggaaaacgccaatctgaggatgagtgctttagatgtggagacgggggacagctggtcctgtgcgatcgaaagttctgtacaaaagcatatcatcttagttgcttgggactcggcaagcggcccttcggtaagtgggaatgtccttggcaccactgtgacgtctgcggtaaaccgtccacatcattctgccatttgtgtcccaactccttctgtaaggaacaccaggatggaaccgcattctcttgcacccccgacggtagatcatactgttgtgagcatgatctgggggccgcatctgtgcgcagcacaaagacagaaaaacctcctccagagcccggaaaacctaagggtaagagaaggaggcgccgaggatggcggagggtgactgaggggaaa

SEQ ID NO: 169 - DNA, 2250 bp, synthetic construct
  source 1..2250: mol_type = other DNA
gccaccatgagcacccccgatccaccactgggtggaacccccaggccaggaccctctcctggccctggtccgtccccaggcgccatgctgggccctagtcccggccctagtcccggatcagcccatagcatgatgggcccgtcccccgggcccccttccgccggacatcccatccccactcaggggcctggaggctatccccaagacaacatgcaccagatgcataagcccatggagtctatgcacgagaaaggaatgtccgacgatcctcggtataaccagatgaagggaatggggatgcgcagcgggggccacgcaggaatgggccctccccctagccccatggaccagcactcccaggggtacccatcacctttgggaggttccgagcatgccagctctccagtcccggcatccggtccttcttctgggcctcagatgagcagcggacccggcggtgcccccctggatggcgccgatccccaggcgctcggacagcaaaataggggacccaccccttttaatcagaaccaactgcatcaactgcgcgcccagatcatggcgtacaagatgcttgcccggggacaacctctgccagatcacttgcagatggccgtgcagggaaagagaccaatgcctggcatgcagcaacagatgcccacattgccaccgccaagcgttagcgccactggccccggacccgggcccggccctgggccaggacccggccctggacccgcacctcctaactattctaggccacacgggatgggaggaccaaacatgccgccgccagggccatccggcgtgcccccggggatgcctgggcaacctccaggtggcccccccaagccatggccagagggacccatggcaaacgccgccgcacctacttctacaccgcaaaagctgatccctccccagcccactggcaggccctccccggccccgcccgctgtgccgcccgctgcgagtcctgttatgccaccccagacacaatccccaggtcagccagctcagcccgccccaatggttcccttgcaccaaaaacagtccagaattactccgatccaaaaacccaggggccttgatcccgttgagatacttcaagaaagagaatacaggcttcaggctcgcatcgcacatagaatccaggagctggagaatctgccaggaagcctggccggagacctgaggacaaaagctacaatcgaactgaaggccttgcggctccttaactttcagcgacagctgagacaagaggtggtggtgtgcatgcgccgagacactgcactcgaaacagctctgaacgcaaaagcatacaagcgcagtaagcgacagtccctgagagaggctagaattactgagaaactggagaaacaacagaagattgaacaggaaagaaaacgcagacaaaagcaccaggaatacctgaatagcatcctgcagcacgctaaagacttcaaggaataccataggagtgtaactgggaagattcagaagctgacaaaggcggtggctacataccacgctaacacggagagggagcaaaagaaggaaaacgaaaggatagagaaggagagaatgcgacggcttatggcagaagatgaggaaggctatcggaaactcatcgaccagaagaaagacaagaggctggcctacctgctgcagcagactgatgagtatgtggccaacttgactgaactggtaagacagcataaagccgcgcaggtggcgaaagagaagaagaagaagaaaaaaaagaagaaggctgaaaatgcggaagggcaaacgccagctatcggtcctgacggtgagccactcgatgagactagtcaaatgtctgacctcccagttaaagtaatacacgtggagagcggtaaaatcctgactgggacggacgccccgaaagcgggccaactggaagcatggctggaaatgaatcctggctacgaggtggccccacgcagcgactccgaggaaagtggatccgaggaagaagaggaagaggaggaagaggagcagccccaagcggcacagcctccaaccctccccgtcgaggagaagaaaaaaattcccgacccagattccgatgatgtgagcgaagttgacgccaggcatattatcgaaaatgccaagcaggacgttgatgatgagtatggcgtgagtcaggctctggccagggggctccaatcctactacgccgtggcgcatgctgtgaccgagagggtggacaagcagtcagcactg

SEQ ID NO: 170 - DNA, 2703 bp, synthetic construct
  source 1..2703: mol_type = other DNA
gccaccatggttaatggtgtgctcaagcagtatcagatcaaaggattggagtggcttgtgagcctttacaataataaccttaacggaattctggccgacgaaatgggactgggtaaaacaatccagaccatcgcactgattacttatctcatggagcacaaacggattaacggccccttcttgattatcgtccccctctctaccctcagcaattgggcttacgaattcgacaaatgggcaccatctgtcgttaaggtatcttacaaggggagccccgccgcccggcgggctttcgtgccccagttgcgatctggcaagtttaacgtcctccttaccacatatgagtacattattaaggacaagcacatcctggccaagatcagatggaagtacatgattgttgacgagggccacagaatgaagaatcaccattgtaagctgacacaagtcctgaatacacattatgtagccccaagaagacttctgctgaccgggacgccactccagaataaattgccagaactctgggccctgctgaactttctgctccctaccatattcaagtcttgctccaccttcgagcagtggttcaatgcgccattcgccatgactggcgaaaaggtggacctgaacgaggaggagactatactcatcatcaggaggctccacaaggtgttgaggccgtttctgctgagaagactgaaaaaggaagtcgaagcccagctgcccgagaaagtggaatatgttattaagtgcgatatgagcgctctgcaaagggttttgtataggcacatgcaggctaaaggcgtgctcctcacagatggaagcgagaaggacaaaaagggaaagggagggactaaaacccttatgaatacaataatgcagcttagaaagatctgcaatcacccatatatgtttcagcatatagaggagtctttcagcgaacacctgggctttacaggaggcatcgtacagggacttgacctgtacagagccagcgggaaatttgagttgcttgataggatccttccaaaactgcgggcaaccaatcacaaggtgcttcttttttgccagatgactagcctcatgaccatcatggaggactacttcgcttatcgaggatttaaatacttgcgcctcgacggcacaaccaaagcagaggacagaggaatgcttttgaaaacctttaacgagcccggctcagaatactttattttcctgctttctacccgggcagggggcttgggtctcaacctgcagagtgctgatacggtaattatcttcgacagcgattggaatccccaccaggaccttcaggctcaggatcgcgcccaccgaattgggcagcagaacgaagtgcgcgtactccgcctgtgtacagtgaatagtgttgaagagaaaatcctcgctgccgccaagtataaactcaacgttgatcaaaaggtgattcaggcgggcatgtttgaccagaagtcttcctcccacgagcggcgagcatttctgcaggcaatacttgagcatgaagaacaggatgaatcccgccattgttctacaggcagcggtagtgcctccttcgcccacacagccccccctccagctggggtgaatcccgatcttgaagaaccccctttgaaggaagaggatgaggtccctgacgatgaaactgtcaaccagatgattgctagacacgaagaagagttcgacctcttcatgcggatggacctggatagaaggcgggaggaagcccgaaacccgaagcggaaaccgcgcctgatggaagaagacgagctgccttcatggattattaaagatgatgcggaagtcgagcggctcacttgtgaagaggaggaggagaagatgttcgggaggggtagtcggcaccggaaggaggtggattattcagatagcctgacagaaaagcaatggctcaaagccattgaggaaggcaccctggaggagattgaagaagaagtacggcagaagaaaagcagcagaaagagaaaacgggattctgacgctgggagttccactcccacaacctctacacgaagcagagataaggatgacgagtccaagaaacagaagaaaaggggacgcccaccagccgaaaagttgagccccaacccacccaacctcacgaagaagatgaagaagatcgtcgatgctgttattaagtacaaggacagcagttcaggccgccaactttcagaagtgttcatccagctgccatcacggaaagagttgccagagtattacgaactgattagaaagccagttgattttaagaagattaaggaaaggatccggaatcataaatatagatctctgaatgatttggagaaggatgttatgctgttgtgtcagaacgcccaaaccttcaacctcgagggatctctgatatatgaggatagcattgtcctccagagtgtatttacctctgtgcggcagaagatagagaaggaggatgattctgagggcgaggagtctgaggaagaggaagaaggcgaggaagaaggatccgagtcagaatccaggtctgttaaggtgaagatcaaattgggcagaaaggagaaagctcaggatagactgaagggcgggagaagacgcccgagcagaggctctcgggcgaagcctgtggtgagtgatgatgattccgaggaagaacaggaagaagatcgctctggttctggctcagaagaggac

SEQ ID NO: 171 - DNA, 1785 bp, synthetic construct
  source 1..1785: mol_type = other DNA
gccaccatgtctagtcttccaggatgcatcgggctggacgccgcaaccgctacagttgagtcagaggaaatcgcagagcttcagcaggcggttgtggaggagcttggcatcagcatggaggagctcagacacttcatagatgaggaactggagaagatggattgcgtgcaacaaaggaagaaacagcttgccgaattggaaacctgggtaattcagaaagaatccgaggtggcacacgttgatcagctttttgacgatgctagtcgcgcggtcaccaactgtgagtccctggttaaagacttttacagtaagctggggctgcagtatcgggatagctccagcgaggacgagtcctctagaccgacagagataattgagattcccgacgaggacgacgatgtcctgagtatcgatagcggtgatgccggctcccggacaccaaaagaccagaaattgcgagaggccatggcggcgctgcgaaaatcagctcaggacgtccaaaagttcatggatgccgtaaacaagaagtcatcatcacaggatctgcacaaaggaaccctcagtcaaatgtctggggagctctccaaggatggggatctgatagttagtatgcgaatcctcggcaaaaagagaactaagacatggcacaaggggactctcatcgctattcagactgtgggacctggaaaaaagtacaaggtgaagtttgataataaggggaaatccctcctgagcggcaatcacattgcttatgactaccatcctcccgcggataagttgtatgtgggctctagagtcgtggctaagtataaggatgggaaccaggtctggttgtacgccgggatagtggccgagacacccaatgtaaagaataaactgcgattcttgatttttttcgatgatggctacgcctcatatgtgacacagtccgagctgtatcccatttgcagacccctgaagaagacttgggaagacatagaagatatctcttgtcgagatttcatcgaggagtacgtgacagcctacccaaacagacccatggttctgcttaagtccggacagctcataaaaacagagtgggaaggtacctggtggaaatccagagtggaggaggttgacgggagccttgtgcgcatcctgttcctggatgataagcgctgcgagtggatctataggggctccaccagactggagccaatgtttagtatgaaaacatcctctgcaagtgccctggagaagaaacagggccagctcaggactcgccctaacatgggtgcagtcagatccaaaggaccagtggttcagtatactcaggacctcaccggaacaggaacccagtttaaacccgtggaacctccccaacctaccgcccctcccgctcccccattcccccctgctccgccactgagcccgcaggctggcgactcagatcttgaaagccagctggcccagagccgaaaacaggtggccaaaaagtcaacaagctttcgccctggatcagtcggaagtggacattctagccccacatcacccgccctgtctgaaaatgtgtctggaggcaagcctggtatcaatcaaacctacaggtccccgcttgggtcaacagctagtgcccctgccccctccgctctgcccgctcccccagcaccccccgtttttcatggtatgctggagcgcgctccagccgagccctcctatcgcgccccaatggaaaagctgttttatcttccccacgtgtgcagctatacatgtctctcaagggtgcgccccatgcggaatgagcaa

SEQ ID NO: 172 - DNA, 1887 bp, synthetic construct
  source 1..1887: mol_type = other DNA
gccaccatggtggacaggaagttccaaccctataagccattttactatatcctcgatatcacctatggaaaagaggatgttcccttgtcttgtgtgaatgagatagacacgaccccacccccgcaggttgcctactccaaggagaggatccctggcaagggagtctttattaacaccggacctgagttcctggtcgggtgcgactgcaaggatggatgccgagataagtccaagtgcgcatgccaccagctcacgatccaggctaccgcatgcaccccaggcggccaaattaaccccaattcagggtatcagtataagcggctcgaagagtgtctgccgaccggggtttacgaatgtaacaaaaggtgcaagtgcgacccaaacatgtgcaccaatagacttgtgcagcacggtcttcaagttcggctgcagctcttcaaaacacagaataaggggtggggaatcagatgccttgacgatatcgccaaggggagcttcgtgtgtatatacgcaggcaagatccttacggacgactttgccgataaggagggcttggagatgggagacgaatatttcgccaatttggatcatatcgaatccgttgagaactttaaagaaggctacgaaagtgatgctccttgcagcagtgacagttctggagttgacctgaaggatcaggaggatggcaactcaggcacggaggaccccgaggaaagcaacgatgactcctctgacgacaatttttgcaaggacgaggacttctccacctcctccgtctggaggtcctatgcaaccaggcgccagaccagaggtcagaaggaaaatggtctgtctgagaccacttcaaaagattctcacccccccgaccttgggcccccacacatccctgtgcctccctccatacccgtaggtggatgcaatccacccagtagtgaagagaccccaaagaataaagtcgcttcttggctcagttgcaattctgtctctgaggggggatttgctgactccgattctcactcaagtttcaagactaatgagggaggggagggaagggcgggggggtcaaggatggaagcagaaaaggctagcactagtggattgggtattaaggacgagggtgacatcaagcaggccaagaaagaagatactgatgataggaataaaatgagcgttgtgacagagtcaagtaggaactatggatacaatccttcacctgtcaagccggagggtcttaggagaccacctagtaagaccagcatgcaccagtctcgccgactgatggcatctgctcagagcaaccccgacgacgtgctgacactgtctagttccaccgagagcgagggggagtcagggacatcaagaaagcccacagccggccagacatctgcgacagctgttgatagcgacgacatccagaccatctcctctgggtctgagggcgacgacttcgaggacaaaaaaaacatgacaggtcccatgaagaggcaggtggccgttaaatcaaccagagggtttgccctgaagagtacacatgggatcgcaatcaaatcaacaaacatggcgagcgtcgataagggtgagtccgctcccgtgagaaagaacacacgccagttttacgacggtgaagagtcctgttatatcattgacgctaagctggagggcaacctcggtaggtatctgaatcacagctgttcacctaatctgttcgtgcagaacgtatttgtagatactcacgacctcagattcccttgggtcgcgttctttgctagcaagagaatacgcgcagggaccgagctgacctgggactacaattacgaggtggggagcgtcgaaggaaaagaactgctgtgctgctgtggcgcaattgagtgtagaggcaggctcttg

SEQ ID NO: 173 - DNA, 1185 bp, synthetic construct
  source 1..1185: mol_type = other DNA
gccaccatgggcgaagggggagctgcagcggcgcttgtagccgcggctgcagcggccgccgccgctgccgcagctgtggtagcagggcagcggcggaggcgcctcgggagacgcgctagatgccatgggcccggacgggcagccggaggtaaaatgagcaaaccgtgtgccgtcgaagccgcagctgcagcagttgcagccaccgcccccggccctgagatggtggaaaggcgcggtcctggacggccaaggacagacggagagaatgtctttactggccagtccaaaatctattcctatatgagtcctaacaaatgctccggtatgaggtttcccctgcaggaggagaactcagttacccaccacgaggtgaagtgccaaggtaaacctttggccggcatttatcggaagcgggaagagaagcgcaatgccgggaacgctgtgcgatctgctatgaaatccgaggagcagaagattaaggatgcgaggaaaggaccattggtccctttcccaaatcagaagtccgaagctgccgaacccccaaaaacacctccgtcatcctgtgattcaactaatgccgccatcgccaagcaagctctcaaaaagcctataaagggaaagcaggctccccggaaaaaggctcaaggcaaaactcagcaaaacaggaaacttaccgatttctacccggtgcgcaggtctagccggaaatccaaggctgaattgcagagcgaggagagaaagcgcattgatgagctgatcgagtccggtaaggaggagggtatgaaaattgacttgattgatggaaagggccgaggcgtgattgccactaaacagttttcacgaggagatttcgtggtggagtaccacggagatctgatcgagattacagacgctaagaaaagagaggctctctatgcgcaggaccctagcaccggctgctatatgtactactttcagtacctgagtaagacctactgtgtagacgccactcgggagaccaatcggctgggccggcttatcaaccattctaaatgtggaaattgccagaccaagttgcatgatatagacggtgtcccacacttgattttgattgcctctcgggatatagctgccggcgaggagctcctgtacgactatggggatcgctcaaaggcctctattgaggcccatccatggctgaaacac

SEQ ID NO: 174 - DNA, 2841 bp, synthetic construct
  source 1..2841: mol_type = other DNA
gccaccatgagtgggcctgtgaccgtgctcacacggcagactaccgccgcggagttggactctcataccccagctctcgagcagcagactacatcctccgagaaaaccccaactaagcgcacagcagcgagcgtgctgaataactttatcgaatctccatccaagctgctcgatacaccaatcaagaatcttcttgacaccccggtgaagacacagtatgattttccttcatgccgctgcgtggagcagatcattgagaaagacgaaggtcccttctacacacacctgggggcaggcccaaacgtagctgctatccgcgagattatggaggagcgcttcggtcaaaaggggaaggccatcagaatcgagagggtgatttataccggaaaggaaggcaaaagctctcagggatgccccatcgccaagtgggtggttcggcgatcttcttcagaggaaaagttgctttgtctggttagggagagggccggacacacttgtgaggctgccgtcattgtgattttgatccttgtgtgggaaggcatacccctgtcactggctgacaagttgtactctgagttgacagaaacattgcgaaaatacggtacactcacaaatagaaggtgcgcactcaatgaggaacgcacctgcgcatgtcagggcttggaccccgagacgtgcggcgcgagcttttccttcgggtgctcctggagcatgtactacaacggttgcaagtttgccaggtcaaagattcctcggaaattcaagctgcttggcgatgatccgaaagaggaagaaaagttggagagccatctgcagaatctgtctaccctgatggctcccacttataaaaagctcgccccagatgcatataacaatcagattgaatatgaacaccgcgctccagagtgcagactcgggctcaaagagggtaggcctttttccggtgtgactgcctgtctggacttctgtgcacatgcacatagggacctgcacaacatgcaaaacgggtccactcttgtgtgtacacttacaagagaggataatagagaattcggcgggaaaccagaggatgaacagctgcacgtgctccccctgtacaaggtgagtgacgtggatgagtttggaagcgttgaggctcaggaggaaaaaaagaggagcggagccatccaggtgctgtcttcctttcgaaggaaggtgaggatgctggctgagccggtcaagacatgtagacagagaaaactggaagccaagaaagccgctgcagagaaactttcaagtctggaaaactcatctaacaaaaacgaaaaggagaagagcgcccccagcaggactaagcaaacagagaatgcctcccaggcaaagcagctggccgaacttttgaggctgtccggccccgttatgcagcaatcacagcaaccacaacctctccagaagcagccgccacagcctcagcagcaacagagaccacagcagcagcagccccaccatccacagacagaaagcgtgaactcctattccgcatccgggagcactaacccatacatgaggcgaccaaatcccgtgagtccttacccaaacagttctcataccagcgacatttacgggtccacatcaccaatgaacttttatagcacaagctctcaagctgcgggctcttatctgaactcaagcaatccaatgaacccatatcctgggcttctgaatcaaaatacccagtacccatcctatcagtgcaacggaaatctgtcagtcgacaattgtagtccatatctcggctcctacagtccccagagccagccaatggatctttaccggtatccttcacaggacccattgtccaaattgtcactcccacctattcacactctgtatcagccgagatttggcaattcccagtctttcactagcaaataccttggttatggcaatcagaatatgcagggggacggatttagctcctgcacaatccgcccgaacgtgcaccatgttggtaaactccccccctacccgacgcacgagatggatggtcacttcatgggggccactagccgccttcctcccaacctgtctaaccccaatatggattataagaacggggagcaccattctccaagccacataatccataactacagcgccgctcccggaatgtttaacagttccctgcacgcccttcacctgcagaacaaagagaatgatatgctgtcccacactgctaatggcctctctaagatgcttcccgctcttaaccatgacagaactgcctgcgtgcagggcgggctccacaaactcagtgacgccaatggtcaagaaaaacagccattggcgctggtgcagggtgtggcgtccggggcagaagacaatgacgaagtatggtctgacagtgaacagagctttctggatcccgatatcggtggcgtggctgtcgcacctacacacggctctatcctgattgagtgtgcaaaacgggaactccatgcaacaacaccactgaagaacccaaatcgcaatcatccgacgcggataagtctggtgttctaccagcataaatccatgaatgaaccgaagcacggcctggctctgtgggaagccaaaatggccgaaaaggccagggaaaaagaagaggagtgcgagaaatacggacccgattacgtgccccagaaatcccatggcaaaaaagtcaagagagaacccgctgagcctcacgaaacttctgaaccgacatatctgaggttcataaagtctctcgcagagaggactatgtctgtgacaacggactctactgttaccacttcaccttatgccttcactagagtgaccggaccctacaatcgatatatc

SEQ ID NO: 175 - DNA, 1071 bp, synthetic construct
  source 1..1071: mol_type = other DNA
gccaccatgagcgttaactatgctgcaggcttgtcaccctatgcagacaagggcaaatgcggtctccctgaaatttttgaccccccagaagagctggagcgcaaagtgtgggagcttgccagactggtgtggcagtcaagctctgtcgtgttccacactggagctggtatctcaacggcttcaggaatccctgattttcgggggccccacggcgtgtggacaatggaagagaggggccttgccccaaagttcgataccacgtttgaatctgccagaccaacgcaaacacacatggcccttgtgcagctggagcgggtcggcctgctgagatttctggtttctcagaacgtggatggactccacgtcagatcaggctttccaagagataaactcgctgagctccacggaaacatgtttgtcgaggaatgtgcaaaatgtaagactcagtatgtgcgggacactgtcgtcgggacgatgggcttgaaggccaccgggcggctttgcaccgtggccaaagctcgaggtcttcgcgcctgtagaggagaattgcgggacactatcctggactgggaggactcactgccagatcgagatcttgcactggcagatgaagccagtcggaatgccgatctgtctataacgctcggcacaagcctgcaaattcggccctccggaaacctgccccttgcaactaagcgccgcggggggcgcctggtgatcgttaacctgcagcccacgaagcatgatcgccacgccgatctcaggatacatggctatgtggacgaggttatgacccgactgatgaagcatctgggcctggaaatccccgcatgggacggacctagggtactggagagggcgctgcctccactgcctaggcccccaacccctaagctggagcctaaagaggagagtccgacgcgcatcaatggatccatcccggcggggccaaaacaggagccttgtgctcagcacaatggcagtgagccggcgtccccaaagcgagaacgccccacaagtcctgcgccacaccggcccccaaagagggtgaaggccaaggctgtaccctcc

SEQ ID NO: 176 - DNA, 2082 bp, synthetic construct
  source 1..2082: mol_type = other DNA
gccaccatgaagatattttgttctagagctaatcctaccaccggctccgtcgagtggctggaagaagacgaacattacgactatcatcaggaaatcgccagatcctcttatgcggatatgctgcacgacaaagacaggaacgttaagtattaccaaggaattcgggcagccgttagccgggtgaaggaccgaggccaaaaggctcttgttttggatatagggaccggaaccggtctgctcagcatgatggcagtgactgccggagcagatttttgttacgccatcgaggttttcaagcctatggccgacgccgctgtgaagatcgtggaaaaaaatgggttcagcgacaaaatcaaggtaattaataaacacagcactgaggtcacagtaggaccagaaggagatatgccttgtagagccaatattttggtgacagaactgttcgataccgaactgattggcgaaggggcactgcctagctacgagcacgcccaccgccatctcgtggaggagaactgtgaggctgttcctcaccgggccacagtgtacgcgcagctggttgagagtgggagaatgtggagctggaacaaactctttccaatccacgtacagacctctttgggggaacaggtgatcgtgccacccgtagacgtcgagtcctgcccaggggcaccatcagtctgtgacatacagttgaatcaggtcagcccagccgactttaccgtacttagcgatgtcctgcctatgttttctatcgatttttcaaagcaggtatcctcaagcgctgcgtgccacagccgacgcttcgaacccctgaccagcggtcgcgcgcaggtcgtcctcagctggtgggatatagaaatggaccccgagggcaaaatcaaatgtactatggccccgttttgggcgcactccgatccagaggaaatgcagtggagagaccactggatgcaatgcgtctactttctgcctcaggaggaacccgtggtgcagggcagtgctttgtatctcgtggcgcaccacgatgattactgcgtatggtatagcttgcagcgaacttcccccgagaaaaatgagcgggtgcgacagatgcgccccgtctgcgattgccaggcgcatctgctgtggaaccggccaaggttcggggaaatcaatgatcaggatcgcaccgatcgctacgtgcaggcccttcgcaccgtacttaagcccgattccgtgtgtctgtgcgtatccgacggaagcttgctgtctgtgcttgcgcaccatctgggagtggagcaggtctttaccgttgaaagttctgccgcatctcataagttgctccggaagatcttcaaagctaatcacctcgaagataaaataaacattattgagaaaaggccagagctgctgacaaacgaagacttgcagggccgcaaggtaagcctcctgctgggggagccctttttcactacaagcctgctcccttggcacaatctctacttctggtatgtccggactgctgtggaccaacacctggggccaggcgccatggtgatgcctcaggccgccagcctccacgctgttgttgtcgaattccgcgatttgtggcgaatacggagcccatgcggtgactgcgaaggttttgatgtgcatatcatggatgatatgataaaacgggccctcgacttcagagagagccgagaagcagaaccccaccccctctgggagtatccatgccggtcacttagtgaaccctggcagattctgactttcgattttcagcagcccgtgccgctgcagccactgtgcgccgagggcacagtggaactgagacgccccgggcagtcacacgccgcagtgctttggatggagtatcacctcacccccgagtgcactctgagtacaggactgttggaacccgctgaccccgagggtggctgttgttggaatccgcactgcaaacaagcagtgtatttctttagtccagcgcctgatcccagggccctcctcggtggtcctcgcactgtatcctacgctgtggagttccatccagacaccggggacataataatggaatttcggcatgccgatacacccgat

SEQ ID NO: 177 - DNA, 831 bp, synthetic construct
  source 1..831: mol_type = other DNA
gccaccatgtcatcaagtatggccgatttccgcaagttcttcgccaaggctaaacacatagtgatcatctcaggggcgggagtaagtgccgaaagcggtgtaccaacttttcgcggcgccggagggtactggagaaagtggcaagcccaagacctcgccaccccactggcattcgctcataacccttcaagggtgtgggagttttatcactatcgacgggaggtcatgggaagtaaagaaccgaacgccggccacagggccatcgcagaatgtgagactcggctcgggaagcagggccgccgggttgtggtgatcacccagaacatcgatgaactccatcgaaaagctggaacaaagaacttgctcgaaatacacggctcattgtttaaaacaaggtgtactagttgcggggtggtcgcggaaaattacaaaagtcccatctgtccggctttgagcggcaagggtgcccccgagcccggaacccaggacgccagcatacctgtcgaaaaactgcctcgctgcgaagaagcaggctgcggcggcctcctccgaccccacgtggtctggtttggagagaatctggaccccgctattttggaggaggtggaccgagagcttgcacattgcgacctgtgtctcgttgtgggtacatccagtgtggtctacccagccgccatgttcgcgccccaggtggccgcaagaggagtgcccgtggcagagtttaacacggagacaaccccggccaccaaccgctttagattccacttccagggtccgtgtggaactacactcccagaagctctcgcctgtcacgagaacgagactgtaagt

SEQ ID NO: 178 - DNA, 2010 bp, synthetic construct
  source 1..2010: mol_type = other DNA
gccaccatggccgctaatatgtatcgagtgggggactatgtctacttcgaaaattctagcagcaatccatatctcgtgcggcgcattgaagagctgaacaagaccgctaatggtaacgtagaggcaaaggtggtgtgcttgttccggcgcagggacattagctcatccctcaattcactcgccgattccaacgcaagggaattcgaggaagaatccaaacagcccggagtgagcgagcaacagaggcatcagctcaagcatcgagaactgtttctctcacggcagttcgagagtcttcctgctactcatatcagaggtaagtgttctgtgacattgctgaatgagacagacattctgtctcaatacctggagaaggaagactgcttcttttattcactggtgttcgaccctgtgcagaaaacactcctggctgatcagggagaaatcagagtggggtgtaagtaccaggctgaaatcccagataggctggtcgaaggcgagagtgataatcgaaaccaacaaaagatggaaatgaaagtgtgggatccagacaacccccttacagatcgccaaatcgaccagttcctcgtcgtggcgcgggcagtcggtactttcgcaagagcgctggactgctctagcagtatcaggcagccgagcctgcacatgtccgccgctgctgcctctcgcgatattactctgtttcacgctatggacacgctgcaaagaaatggttacgatcttgccaaggctatgtccacactggtaccacagggagggccagtcctgtgccgggacgagatggaggagtggtccgcctcagaagctatgctgttcgaagaggccctcgaaaagtacggaaaagactttaatgatatcagacaggattttctgccctggaagtcactcgccagcatcgtccagttttattacatgtggaagaccacagatcggtacattcagcaaaaacgacttaaggccgcagaggcggatagcaaactgaaacaggtgtacatcccaacctataccaaacctaatcccaatcagatcatttccgttggatcaaaacctggcatgaacggcgccgggttccagaagggactgacctgcgagtcctgccacacaactcagtctgcccagtggtacgcttgggggccccccaacatgcaatgccgcctttgtgcttcatgttggatttattggaaaaagtacggcggacttaagacccctacacagttggagggagctactagaggcaccacagagccccactcacgaggacacctttctcgaccagaagcccagtctctgtctccctacacaacatccgcgaaccgggccaagctgcttgctaaaaatcggcagacgtttcttctgcagactaccaaactgacaaggctggccagacgaatgtgtcgcgatctccttcagcccagaagagcggcccgacgaccctacgctccaattaatgccaacgccattaaggctgagtgctccatacggctgccaaaagcggccaagacaccactgaagatccatcctctggttagactgcccctggcgaccattgtgaaggatctggtggcacaggcgcccctgaaaccgaagaccccccgcgggactaaaactccaataaaccggaaccagctgtctcagaaccgcggactcggaggcataatggtcaaacgcgcttatgagacgatggcaggggccggtgtacccttttctgctaacggaagaccgcttgcgtccgggattcggtcctcctctcagcctgccgccaaaaggcagaagttgaaccccgcagacgccccaaacccagtcgttttcgtcgcaaccaaagacacgagagcactccggaaagccctgacccatttggagatgcgcagggctgcaagacggcccaacttgcccctgaaagtaaagcctaccctgattgccgtcagacccccagttcctctgccagcgccctcacaccctgcttctaccaacgaacctatcgttctcgaagat

SEQ ID NO: 179 - DNA, 1935 bp, synthetic construct
  source 1..1935: mol_type = other DNA
gccaccatggccgccgccgacgctgaagcagtgccagcacgaggggaaccccaacaggattgctgtgtgaagaccgaactgcttggggaggaaactcccatggcagccgatgaaggtagtgcagagaaacaagccggagaagcccatatggccgccgatggtgagacaaacggcagctgcgaaaattccgacgccagtagccatgctaatgccgcaaaacacactcaagactccgcccgggtgaatcctcaggacggcacgaacacactgactaggatcgctgagaacggcgtttccgaacgcgattctgaggccgcaaagcagaaccacgtcaccgctgatgacttcgtgcaaacatccgtgataggtagtaatgggtatattctgaataagcccgctttgcaggcacaacctctgcgcacaaccagcacactggcttctagcctccccgggcacgctgcaaaaacacttcctggtggagctgggaagggtcgaacccctagcgccttcccccagacccccgctgctccaccagccacactgggggaagggtccgcagatacagaagataggaaactgccagcgccaggcgctgacgtgaaggttcaccgggcacggaagaccatgccaaaaagcgtcgtgggtctgcatgctgcttccaaagacccacgggaggttcgggaggcgagagaccacaaagaacctaaagaagagatcaataagaacataagcgatttcggtcggcaacagcttctgcccccgttcccgtctctccaccagtcactgccacagaaccaatgttacatggccacgactaagtcccagacggcctgtctccctttcgttctggcagcagctgtgtctcggaagaaaaagaggcggatggggacctacagcttggtgccaaaaaagaaaacaaaagttctgaagcagaggacagtgatcgaaatgttcaaaagcatcactcactccactgtaggttccaagggcgaaaaagacctcggcgcaagctccctgcatgtgaacggcgagtccctggagatggactcagacgaagacgattccgaggagcttgaagaagatgacgggcacggagcagagcaggccgcggccttcccgactgaggatagccgaactagcaaagaaagcatgtcagaggccgatagggcccagaagatggacggagaaagtgaagaagagcaggaatccgtggacacaggtgaggaagaggagggcggggatgaatccgatctcagtagcgaatctagtatcaagaaaaagttcctgaaaaggaaggggaaaactgactctccttggatcaaacccgcccggaagcggcgccgccggtctagaaaaaaaccatccggggcacttgggagtgagagctacaagtccagcgcagggtccgcagagcagaccgctccaggggacagcacagggtatatggaggtgagccttgactccctcgacctccgggtaaagggaatcctcagttctcaggcagaggggctcgcgaacggccctgacgtcctggagactgacggactgcaagaggtgcctctgtgcagctgtcgaatggaaacgcctaaaagcagggaaattactaccctggcaaataaccaatgcatggctacggaaagcgttgatcacgaattgggacgctgcaccaatagcgtagtcaagtatgaactgatgcggccctctaacaaggccccgctgctggtactctgcgaagaccacaggggcaggatggtaaaacaccagtgctgccctggttgtggctacttctgcaccgcaggaaacttcatggagtgccagcccgagagttctattagccatagattccataaagactgcgcttctcgggtcaacaacgcttcctactgcccccactgcggtgaagagtcatccaaggcaaaggaggtaacgatcgcc

SEQ ID NO: 180 - DNA, 1974 bp, synthetic construct
  source 1..1974: mol_type = other DNA
gccaccatgaaggctgatacaacgagtacagtgacaccagtgccagggcaggagaagggctccgccttggaggggcgcgcagatacgactacaggaagcgctgctggccctcctctgtccgaggacgataagctccagggagctgcctctcacgttccagaaggcttcgatcctactggtccggcaggtcttgggaggcccacacccggactgtctcagggccccggtaaggaaacgctcgaatcagctctgatcgctctcgattccgagaaacctaagaaactgcgcttccatccaaagcagctctattttagtgctcgccagggggaactgcaaaaagtgctgttgatgttggttgacggcatcgaccccaacttcaagatggaacatcagaataaaagaagcccgctccacgccgcagccgaagccggacatgtggacatttgtcatatgctggtgcaggcgggggccaatatcgacacctgtagcgaggatcagagaaccccgctgatggaagccgctgagaacaaccatctggaggctgtgaaatatctgataaaagccggcgctttggtggatccaaaggacgcggagggctccacatgcctccatttggcagccaaaaaagggcattatgaagtcgtgcagtacctcttgagtaacggacaaatggatgtgaattgccaagacgacggcgggtggaccccgatgatctgggcaaccgagtacaagcacgtagacttggttaaactgctgctctccaagggaagtgatataaatataagggacaacgaggagaacatctgccttcactgggcagcgttcagcggctgtgtagatattgcagagatcctcctggccgccaagtgtgatctccatgccgttaatatccacggtgactctccactgcacatcgcagcaagggagaaccgatatgattgcgtggtgctgtttctcagtagggatagcgatgtcaccctgaaaaacaaggaaggtgaaactccactgcaatgtgcctcacttaacagccaggtttggagcgcgcttcagatgtcaaaggctctgcaagactcagcacccgaccggccctctcccgtggagagaattgtgtcaagggatattgcaagaggctacgaaagaatccctataccatgcgttaacgccgtggacagtgagccctgtccctcaaattacaagtatgtttcccaaaactgtgtcactagccccatgaacatagatagaaacatcacccatctgcagtactgcgtttgtattgatgactgttccagttccaactgcatgtgcggtcagctgagcatgcgatgttggtacgacaaggacggtagactgcttcccgaatttaatatggcggagcccccgctcatcttcgagtgtaaccacgcttgcagctgctggcggaattgccgcaaccgcgttgttcagaatggtctgagggccaggcttcagctgtaccggaccagggacatgggctggggcgtgcgatctctgcaggacattccgccggggacattcgtctgtgaatacgtgggagaattgatttctgattccgaagctgacgtcagggaggaggactcctatctgtttgatctcgacaataaggacggggaggtatattgcatcgacgcaaggttctatggcaatgtgtctagattcatcaaccaccattgcgaacccaatctcgtgccagtccgggtgtttatggcacaccaagatctgaggttcccacgaatcgctttctttagtacgagactgattgaggctggggaacagctcgggttcgattacggggagaggttctgggatatcaaaggaaaactgttctcatgtcgatgcggatccccaaagtgccgccactcaagcgctgccctggcgcagcgacaggcctcagccgcacaagaggcacaggaggatggcctgcccgatacatcatctgccgccgcagccgatcccctt

SEQ ID NO: 181 - DNA, 3162 bp, synthetic construct
  source 1..3162: mol_type = other DNA
gccaccatggcccataacgctggcgcagcagccgccgctggcacccattctgcaaagagcggagggagcgaagctgcactcaaagaaggggggtcagccgcagctctgtcctcatcctcctccagtagcgccgccgccgctgcagcgagctcttcaagttcttctgggcctggatccgcgatggagactggccttcttccaaaccataaattgaagaccgtcggcgaggctcccgctgctcccccacatcagcagcaccaccatcaccatcatgcccaccaccatcatcaccacgcacaccacctccaccaccaccacgcgcttcagcaacagcttaatcagtttcagcagcagcaacagcagcaacaacagcaacagcagcagcagcagcagcaacaacaccctatatccaataacaactccctgggtggagccggaggaggcgctccccagccaggtcccgatatggagcaaccgcagcacgggggtgctaaagactcagctgcagggggccaggctgacccccccggccctcccctgcttagcaaacccggagacgaagacgacgctccacctaagatgggtgagcctgctgggggaaggtacgaacatcccggactcggggcacttggcacccagcagcctccggttgcagttcctgggggtggcggaggccctgctgcagtgccggaatttaataattactacggctctgccgcacccgcgtcagggggcccagggggcagggccggtccctgttttgatcaacacggtggacagcagagtcctggcatggggatgatgcattctgcgagcgccgcagcagccggagcccctggctctatggacccgctgcaaaattcacacgaaggatatcctaactcacagtgtaaccattaccccgggtatagccgccctggggctgggggagggggaggcggaggcggtggcggaggcggcggcagtggcggagggggaggtgggggcggggctggcgccggcggtgctggcgcaggggctgtggcagctgcggcggcggctgccgctgcagccgctggaggcggtggcgggggcggctatggtggtagttcagctggctatggagtcctctcaagtccacggcagcagggtggcgggatgatgatggggcccggtgggggtggagctgccagcctgagtaaggctgccgccggctctgccgcaggcggcttccagcggttcgccgggcagaaccaacatccctcaggagcaacgcctaccctgaaccaattgcttacttccccttctcccatgatgagatcctacggtggctcttatcctgagtattcatccccctccgctccccccccacctccctctcaaccacagtcacaagccgcggctgccggcgccgccgcaggtggacagcaggctgctgccgggatgggacttggcaaagacatgggcgcacaatatgccgccgcaagcccggcatgggccgcggcacaacagcggagtcaccccgctatgtctcctgggacacccggacctactatggggcgaagccagggatctcccatggatccgatggtaatgaaacgaccccagctctacggcatgggcagcaatccccatagtcagccacagcaaagctctccatacccgggtggctcttacggccctcctggtccccagaggtacccaattggcatccagggcagaacaccgggcgccatggctggcatgcaatacccccagcaacagatgccgccgcagtacggccagcagggcgtaagtggatactgccagcagggtcagcagccatattattcacagcagcctcagccacctcatctgcctccacaagcacagtatctgccaagtcagagtcagcagcgctatcagcctcaacaggatatgtcacaagaagggtacggaacccggtctcaacccccgcttgcacctggcaaacccaatcatgaggaccttaacctcatccaacaagagcggccaagttctttgcccgatctctccggctccattgatgatctgcctaccggtacagaagcaacactgtcaagtgctgtctccgcctccgggtccacctcatcccagggggatcagagcaatcccgcccagtccccatttagccctcacgcttctcctcacctctcaagcattcccggaggcccaagccctagcccagtcggatcacccgtaggctctaaccagtcacgaagcggacctataagccccgcctccatcccaggatcacagatgcccccccagcccccaggttcccagtctgaatcaagtagccaccctgctctgagtcagtcaccgatgcctcaagagcgggggttcatggcggggactcagagaaatccacagatggcgcagtacggtcctcagcagacgggacctagcatgagtccccaccctagccctggtggccagatgcacgctgggatctcaagcttccagcagtccaactcatcaggcacctatggaccccagatgagccaatacggcccgcaaggtaactactcccgccccccggcttattccggagtcccctcagcaagctactccgggccggggcccgggatgggtattagcgccaataaccagatgcacggccaagggccctctcagccgtgcggagcagttcccctcggccggatgcccagcgctggtatgcagaatcgccccttccctggaaacatgtctagcatgacaccttcaagccccggtatgtctcaacaaggcggaccaggcatgggacctccaatgccaaccgtcaatcgaaaagcgcaggaagctgctgcggccgttatgcaggccgcagctaacagcgctcagtccaggcaaggcagctttcccggaatgaaccagagtggactcatggcatctagctctccgtacagccagccaatgaacaactctagcagtctgatgaacactcaggcgcctccctactctatggcccctgcaatggtcaatagctccgcagcttccgttggcctggctgatatgatgtccccgggcgaatctaagttgcctctgccccttaaggcggacggcaaggaggaaggcactccacaacctgaatctaaatccaagaagtcatcatcttcaacaacgaccggagagaagatcaccaaagtctatgagctgggcaat

SEQ ID NO: 182 - DNA, 3285 bp, synthetic construct
  source 1..3285: mol_type = other DNA
gccaccatgagaggagaggagcccccccctgaagtcttctccactggcgatacaaagaaacaaccgaagttgcagcccccgtctcctgccaatagtggtagcctccagggcccacagaccccgcagtctacagggtcaaactctatggccgaagtaccgggagacctcaagcctcctactccagctagcacccctcacgggcaaatgaccccaatgcagggcggccgctctagcaccatcagtgtccacgaccccttttccgacgtgagcgacagctcctttccgaagcggaatagcatgacgcccaatgctccctatcagcagggcatgtccatgcctgatgtgatggggcggatgccatatgaacctaataaagacccctttggtggcatgagaaaggtgcccggttcttccgagccctttatgacacagggccagatgccaaacagctcaatgcaggacatgtataatcagagtccttccggggcgatgtccaatcttgggatgggacagcggcaacagttcccttacggggccagctacgatcggagacacgaaccctacggccaacagtatccaggtcagggaccaccatccgggcagcctccctacggggggcatcaaccaggcctgtacccacaacagcccaattataaacgccacatggatggaatgtatggaccgcccgctaagagacatgagggtgatatgtacaacatgcagtatagttcccaacagcaagagatgtataaccagtacgggggatcctattctgggccggacagacgccccatccaggggcagtacccctacccatatagtagagagcggatgcaagggcctggccagatccagacacatggaataccacctcagatgatgggagggcccctgcagagctcttcttccgagggcccacagcagaatatgtgggcggccaggaatgatatgccatatccctatcagaatcgccagggacctggtggccccacccaagcccctccctatcctggcatgaatcgcaccgatgatatgatggtgcctgaccaaaggatcaatcacgagagccagtggccttcccacgtcagtcagaggcagccatatatgtccagctctgcaagcatgcagcccattacaagacctccccagcctagttaccagacgcctccaagccttccgaatcacatcagccgcgcaccaagcccagcttctttccagcggagcctggaaaacaggatgtccccctcaaagagtccgttcctccccagcatgaagatgcagaaagtgatgcctaccgtgcctacaagccaggttactgggccacctccacaaccccctcccattagacgcgagataaccttcccccccggctccgtcgaggcctcccagcctgtcttgaaacaaagacggaagattaccagcaaagacatagtgactcccgaagcctggcgggtgatgatgagtctgaagtcaggactcttggcagagtccacttgggctctggacacaatcaatatactcctgtacgacgattctacagtggccactttcaatctgtcacagctgagtggctttctcgagctcctggtggagtactttaggaagtgtctgatcgacatattcggtatcctgatggagtacgaggtgggagacccttcccagaaggctctggatcacaacgccgctagaaaggatgacagccagagcctggcggacgactcagggaaggaggaagaagatgctgaatgtattgatgacgacgaagaggacgaggaagatgaggaggaggactccgagaagaccgagtctgacgagaagtcctctatcgctttgacagctcccgacgctgcagccgacccgaaggaaaaacctaagcaggcgtccaagtttgacaaactccccattaagatcgtaaagaagaataatctcttcgtggtggatagatcagacaaactcggcagggtgcaggagttcaactctggcctcttgcattggcagcttggaggaggggatacaaccgaacacatccaaacgcacttcgagagtaaaatggaaattccaccgcggagacgaccacctcctcccctgtcatccgcagggcgcaagaaagaacaggaaggtaagggggattccgaggagcagcaagagaagtccatcattgctacaatcgacgacgtgctgtccgcacggcccggggcccttcctgaagacgcaaaccctggtccgcaaacagagagcagcaagttcccattcggcattcaacaggctaagtcacacagaaacattaaactcctcgaggacgaacctcgctcccgggatgaaacaccgctgtgtaccatcgcccattggcaggattccctggcaaagaggtgcatttgtgtgtctaatatcgtcaggtcactttctttcgtaccgggaaatgatgctgagatgtccaagcaccccgggctggtattgatcttgggaaaactgatcctcctgcaccacgagcacccggagaggaaacgcgctccacagacatatgaaaaggaagaggatgaggataaaggagtggcatgtagcaaggatgagtggtggtgggactgcctcgaggtccttagagataatactcttgtcacactcgctaacatcagcggacagctggatttgagtgcgtataccgagtcaatttgcctgcctattttggacggtctcttgcattggatggtctgcccaagtgcagaagcccaagaccccttccccactgtgggaccgaactctgtgctttcaccacaaagactggtgttggaaaccctttgcaagctgagtattcaggataataacgtggacctgatcctggccactccgccctttagcagacaagagaaattctacgctacgctcgtaagatatgtcggggatcggaaaaatccggtctgcagggagatgtcaatggccttgcttagcaacctggctcagggagatgcacttgctgcccgagccattgccgtgcagaaggggtccatcggcaaccttatttccttcctggaggacggggtgactatggctcaataccagcagtcccagcacaacctgatgcacatgcagccccctccattggaacccccatccgttgacatgatgtgtagggcagcaaaggccctcctggccatggcgagggtggatgaaaatagaagcgaatttctgctccatgaaggccgcctcttggacatctccatatccgctgtgctgaacagtctcgtagcctcagttatctgtgatgtgctgttccagatcggtcagctc

SEQ ID NO: 183 - DNA, 2844 bp, synthetic construct
  source 1..2844: mol_type = other DNA
gccaccatgaagaagccacattatcgagagatcgtttgggtgaaagtgggcaggtaccggtggtggcctgccgagatttgtcacccccgcgccgttcccagtaatatagacaaaatgcgacacgacgtgggcgaatttcctgttctgttctttggctccaacgattatctctggacacatcaggctagggtatttccctatatggagggcgatgtgtctagcaaagacaagatgggcaaaggagtcgacgggacatacaaaaaagcattgcaggaagcggcagccagattcgaagaattgaaagcccagaaggaactgagacagttgcaggaggaccgaaagaacgataagaagccccccccctataagcacatcaaggtgaaccggcctatcgggagagtccaaatttttactgcggacctgtcagagatcccccgatgcaattgcaaagcgaccgacgagaacccctgcggaattgacagcgagtgcattaatcggatgctgctctatgaatgccacccgacagtgtgccccgctgggggcagatgtcagaatcagtgcttcagtaaaagacaataccctgaggtggagatatttaggactctccagagaggctgggggctgcggacaaagaccgatatcaaaaagggtgaatttgtgaacgagtatgttggggagctcatcgacgaagaagagtgcagagcgcgcattcggtacgctcaagaacatgacataacgaacttttacatgctgacccttgataaggacaggattatcgatgctggtcccaaggggaattacgccagatttatgaatcattgctgtcagcccaactgtgagacccagaagtggagcgtcaatggagacaccagagtgggccttttcgccctgtccgatattaaggccggaactgagctgacttttaactacaaccttgagtgtctggggaacggcaagacagtgtgcaagtgtggcgcccctaactgctccgggttcctgggcgtgcggccaaaaaatcaaccaatcgccactgaggaaaagtccaagaaatttaagaagaagcaacaagggaagagaagaacccagggagagataacgaaagagcgagaagatgaatgttttagttgtggggatgctggacagctcgtgtcctgtaagaagccagggtgtcccaaggtgtatcatgccgattgtctgaacctcactaagagacccgctggtaaatgggaatgtccttggcaccagtgtgatatctgtgggaaagaggcagctagcttctgcgagatgtgccccagttctttttgtaaacagcaccgcgaaggcatgctgttcatcagtaagctggatggtcgccttagttgcacagaacacgatccttgtggtccaaatccattggagcctggcgaaatccgagagtacgtccctccgccagtaccactcccccccgggcccagtacccacctcgccgagcagtctactggaatggctgcacaggctcccaaaatgtctgacaagcctccagcagacaccaaccaaatgctgtctctgagcaagaaagcacttgccggaacatgtcaaagacctttgctgcctgaacggccgctcgaaaggactgattccaggcctcaaccgctggacaaggttcgggatctggcaggtagcggcacaaaaagccagtcattggtctctagtcagcggccacttgacagacccccggccgtagccgggccccgccctcaactctctgacaaaccatctcctgtcacctccccctctagcagccccagcgtccggagtcagcccctggagagacctctgggcactgcagatcccagattggataaaagtataggggcagcctcaccacgcccacaaagccttgagaagacatctgtgccaactggcctgagactgccacctcctgaccggcttttgattacctctagccccaagccgcagaccagtgaccgccctacagataaaccccacgcgtccctttcacaaaggctgccgccgccagaaaaagttttgtcagccgtagtgcagaccttggtagccaaagaaaaagccttgcgccctgtggaccagaacacccagtctaagaaccgagccgccctggtgatggatctgattgatcttaccccccgacaaaaggagagagccgcgagcccccaccaagtcacacctcaggcggacgagaagatgccagtgctcgaatccagcagctggcccgcaagtaaggggttggggcatatgccaagagcggtggagaagggatgtgtgtccgacccactgcagacaagtggcaaagctgccgccccatccgaagacccatggcaggcagttaaatctctgacacaggcgcgattgctctcccaaccacctgctaaagcctttttgtatgaaccaaccacacaggctagcggtcgagcttccgcgggcgcagaacaaactcccggccccctctctcagagtcctgggttggtgaaacaagcaaagcaaatggtcggtggtcagcagctgcctgcactggctgccaaaagcgggcagtcttttaggagcctggggaaggccccagcttcactgccaactgaagagaagaagctcgtgacgaccgaacaaagcccctgggcactgggtaaagcatcttccagagcaggactgtggcccatagtggcgggacagacattggcccagtcatgttggtccgccgggagcacccagacactcgcccagacatgttggtccctgggtagaggtcaggaccctaagcctgagcagaataccctgccagctctcaaccaggccccaagtagccataaatgcgccgagagtgagcagaag

SEQ ID NO: 184 - DNA, 1818 bp, synthetic construct
  source 1..1818: mol_type = other DNA
gccaccatggccgttgtctctatgcaggcgtttcaggcagcccagtttgtgaatcctgagttgaacagagacgaggaaggagctgctctgcaccttagcccagacaccgttactgatgtgattgaggccgtagttcagtcagtgaatttgaatcccgagcataagaaaggcctcaagcggaagggatggctgctggaagaacaaacaagaaagaagcagaagcctttgcccgaggaggaggagcaggagaataataagagcttcaacgaggcaccagttgagattcctagtccgtctgagactcccgctaaaccctccgaacctgaaagtaccctgcagcccgtactgtcactgattccgcgcgaaaagaagcctcctcgaccacccaaaaagaagtaccagaaggctggcttgtattctgacgtgtacaagaccacagaccctaagagccgattgatccagctcaaaaaagagaaactggagtacaccccaggtgagcatgaatacgggttgtttccggccccaattcatgtggtgttcttcgtaagcggcaagtatctgcgacagaagcggatcgatttccagctgccatacgatatcctgtggcaatggaagcacaatcaactctacaagaaaccggatgtcccgctgtataagaaaattaggtccaacgtatacgtggacgtcaagcccctgagcggttacgaggctaccacatgcaactgcaaaaagccagacgacgatacaaggaagggctgcgtcgacgactgtttgaatcggatgattttcgccgagtgctcaccgaacacatgtccatgtggcgaacaatgctgtaatcaacgcatccagcgccacgagtgggttcagtgtctggagagattcagagcagaggagaagggctggggtatccggacgaaggagccactcaaagcgggccaattcatcatagaatatctcggcgaggtggtctccgagcaggagtttagaaacagaatgatcgagcaatatcacaaccattccgaccattactgtctgaatcttgattccggcatggttatcgactcataccggatggggaacgaggccagattcatcaatcactcttgtgatcccaactgcgagatgcagaagtggagcgtcaacggcgtataccgcattggcttgtacgcacttaaagacatgcctgctggtacagaactgacctatgactataactttcactccttcaacgtggaaaagcaacaactctgcaaatgcggttttgagaaatgtcgagggattatcggaggtaagagccagcgggttaatgggctgactagcagcaagaactcccaaccgatggctacccacaaaaagagcggcagaagcaaagagaaacgcaagtctaaacataaactgaagaagcggcgaggtcatctttcagaagaacccagcgaaaacataaacacacccactagacttaccccccagttgcagatgaagcccatgagcaacagggagaggaacttcgtgctgaagcatcatgtattcctggtcaggaattgggagaagattcggcagaagcaggaagaggttaagcacacttccgataacattcatagcgcttccctttacactcgctggaatggcatctgccgggacgacggcaatatcaaatccgatgttttcatgacccaattttccgctcttcagacagcacgctcagtacggacgaggaggttggctgcagcagaggagaacatcgaagtggcaagggccgccagactggctcagatcttcaaggaaatctgtgatgggataatctcctataaggactcc

SEQ ID NO: 185 - DNA, 1023 bp, synthetic construct
  source 1..1023: mol_type = other DNA
gccaccatgcccgtcgatcgggaggtgcccatgatcccaagaccacattacgcccaaccaggttgtgtgtacttcatatgtcttctccgcgacgatcttttgctgaggcagggcgactgtgtgtacctgatgcgggatagccgccggacccccgacggacaccctgtgagacagtcttaccgcctgctttcacacatcaatagagacaagctggatattttccgcatagagaaactgtggaaaaacgaaaaagaggaaagattcgcgttcggccatcattattttagaccacacgaaacacaccatagtccttctaggaggttctatcacaatgaactgttccgagtgcccctgtatgaaatcatccccctcgaggccgttgtgggcacttgctgcgtgctcgatctttacacatactgtaaaggccgacccaaaggtgtaaaagaacaggatgtgtacatttgtgactaccgcctggacaagagcgcacatctgttctataagattcatagaaataggtatcctgtgtgtactaagccctacgcattcgatcattttccaaaaaagctgacaccaaaaaaagactttagtcctcattacgtcccagacaattataaaagaaatggaggccgatcttcctggaaatctgagcgcagcaaaccccctctcaaagaccttggccaggaagacgacgcactgcccctcatcgaggaagtcctggcatctcaggagcaggccgccaacgagattcctagcctggaggagccagagcgcgaaggcgccactgccaatgtctctgagggagaaaagaagacagaagagtcatctcaagagcctcagtctacctgtacgccagaggaacggcggcataatcagcgggaaagactgaatcagattctcctgaacctgctggaaaagatcccagggaagaacgccattgatgtcacttatttgctggaagagggtagtggacggaagctgagacggcgaaccctctttatcccggagaacagcttccggaag

SEQ ID NO: 186 - DNA, 867 bp, synthetic construct
  source 1..867: mol_type = other DNA
gccaccatgattgggttgtttgtcccagcctcacctcccctggatcctgaaaaggtgaaagaactgcaaaggtttatcaccctctctaagagattgctggtcatgacgggcgctggcatttctaccgagagtgggatccccgattacagatcagaaaaggtaggcctgtacgcacggaccgaccggagacccattcagcacggagacttcgtcagatctgcccctatccgccagcggtactgggcgagaaatttcgtgggttggccgcagttttcctcccatcaaccaaaccccgcgcattgggctcttagtacatgggaaaaactgggtaaactgtactggctcgtgacccagaatgtggacgcactgcacaccaaggccggatccaggcggctgactgagctgcacggctgcatggaccgcgtgttgtgtcttgattgtggagagcaaactcctcgaggagtgctccaagaaaggtttcaggtgctcaatcccacctggtccgccgaggcacatgggctggcccccgatggggacgtctttctttccgaggagcaggtgcggagtttccaggtacctacttgtgtccagtgcggaggacatctgaagccagatgttgtctttttcggagatactgttaatcctgacaaagtggatttcgtccataaacgggtgaaagaggccgacagcctgctcgtcgtgggcagctctcttcaggtctattctggttaccggtttattctgactgcttgggagaagaagctgcccatcgccatcctgaatatcggccctaccagatctgacgacctggcttgtcttaagttgaactcccggtgtggagagctgcttccgctgatcgatccatgc

SEQ ID NO: 187 - DNA, 1452 bp, synthetic construct
  source 1..1452: mol_type = other DNA
gccaccatggcacagacacagggcacccggagaaaagtgtgttactactatgatggggatgtcggtaattactactatggacagggccaccccatgaagccacacaggattagaatgacccacaacctgctgctcaattacgggctttatcgcaagatggagatctacagacctcacaaggccaacgccgaagagatgaccaaatatcattcagacgactatatcaagtttctgcggtctataagacccgacaacatgtccgagtactccaagcagatgcagcgatttaatgttggtgaagactgtccggtctttgacggactgttcgaattctgccagctgagtacaggcggatccgtggcctcagcagtgaagttgaacaagcaacagactgacattgccgtcaactgggccggggggttgcaccacgccaagaaatcagaagcctctggcttttgctacgtcaatgatatcgtgcttgcgatactcgagctgcttaagtaccaccagcgagttctctatattgacatcgacattcaccacggtgacggcgtggaagaggccttttacactacagatagagtgatgaccgtaagcttccacaagtacggtgagtactttccaggaacaggcgacctccgggacattggggcaggaaaagggaaatattatgctgtaaattacccactgcgcgatggtattgatgacgagagctacgaggccatcttcaaacctgtgatgagcaaagtgatggaaatgttccaacccagcgcagtggtgctccagtgcgggagcgattctctctctggagatcgactcggttgttttaacctgaccattaaaggacacgcaaagtgcgtggagtttgtgaaaagctttaatctcccgatgttgatgttgggaggagggggctataccatccgcaacgtggccagatgttggacttacgaaaccgctgttgcactcgacacagagattccaaatgagctcccttacaatgattacttcgaatattttggacccgattttaagctgcatatcagtccaagcaatatgacgaatcagaatacaaatgagtatctggaaaagatcaagcagagactgtttgagaatcttcgcatgcttccccacgctcccggcgtccagatgcaggccataccagaggacgccatacctgaggagtctggtgatgaggacgaagatgaccccgataagcggatctctatttgttcatctgacaagaggattgcctgcgaagaggagtttagcgattctgaggaggaaggggaaggtggaaggaaaaactcttccaacttcaagaaagccaagcgcgtgaaaaccgaggacgagaaagaaaaggaccctgaggagaagaaggaagtcacagaggaggagaagaccaaagaggagaagcctgaggccaagggtgtgaaggaagaggtgaaactcgct

SEQ ID NO: 188 - DNA, 1395 bp, synthetic construct
  source 1..1395: mol_type = other DNA
gccaccatggcaaccgtgactgctactacgaaggtccctgagatcagagatgtgactcgcattgagcggatcggagcgcatagccatatacgcgggctgggtctcgatgacgcacttgagccaagacaagcgtctcagggcatggtcgggcagctcgcggcccgccgggcggccggcgtggttttggaaatgattcgggagggaaagatcgccggcagagccgtgttgatcgccggccagcccggcacaggcaaaactgccatagccatgggtatggctcaggctctcgggcccgataccccgttcaccgccatcgctggctcagaaattttctctctcgagatgtccaagacagaagctctgacccaggcctttaggcggtcaataggcgtgagaattaaagaggagaccgagatcatcgaaggcgaggttgtggaaattcagatagatcgcccagctaccggcaccggatctaaggttggcaagctgaccctgaaaaccacagagatggagactatttatgacctgggcaccaagatgatcgagagcctgaccaaagacaaggtgcaggcgggagatgtgatcacaattgataaagcgaccggaaaaatcagcaagctcggtcgctcttttacacgcgccagggattatgatgcaatgggatcccagacaaagtttgttcagtgtccggatggcgagctgcaaaagaggaaagaggtcgtgcacacagtctccctgcatgaaattgatgtgatcaattcaaggacacaaggattcctcgcgctgtttagtggggatacaggtgagatcaaaagtgaggttcgagaacagattaatgccaaagtggctgaatggcgggaggaaggtaaggccgagattattcctggggttctgttcatcgatgaggtacacatgttggacattgagagtttctctttcctgaatcgcgcactggagagcgatatggctcccgtgctgattatggcgacaaacagggggataaccagaatccgcgggacctcctatcagagcccccacggaatcccaatcgatctgctcgaccgccttcttattgtgtcaactaccccatatagcgagaaagacaccaagcaaatcctcaggattcgctgcgaggaggaagatgtggagatgagcgaggatgcgtacacagtcctgactagaattggtcttgaaactagcctcagatacgccatccagcttattactgccgcttccctggtgtgtagaaagagaaaagggacggaagtgcaagtcgacgatattaaacgggtgtattcactttttctcgacgaatcccgctcaacgcagtacatgaaagaatatcaggatgcatttctgttcaacgagcttaaaggcgagacaatggacaccagc

SEQ ID NO: 189 - DNA, 1878 bp, synthetic construct
  source 1..1878: mol_type = other DNA
gccaccatgacccaggcggaaaagggggataccgaaaatggaaaggagaaggggggcgagaaggagaaggaacagcgaggcgtaaagagaccgattgttcccgctctggtgcccgagagcctccaagagcagattcagtcaaacttcatcatcgtcattcaccctggctcaacaaccttgaggatcggtcgagcaactgacacgctgcccgctagtattcctcatgttatcgccagacgccacaagcaacaggggcagccactgtataaggatagttggctcctgagggagggtcttaacaagcccgaatccaatgagcagagacaaaacggcctgaaaatggtggaccaggctatctggagtaaaaagatgagcaacggtacacgcagaatccctgtcagtcccgagcaggccaggagttataacaagcagatgagacctgcgatcttggaccattgctccgggaataaatggaccaataccagtcatcatcctgagtatctcgtgggcgaggaggctctgtacgttaacccccttgactgttacaatattcactggccgatccgaagagggcagctgaatattcaccccggtcctggggggagcttgacagccgtcctcgcagacatcgaggtcatctggagccatgcgattcagaagtatctggaaatcccccttaaagacctgaagtattatcggtgcatattgttgatccccgatatatataacaagcagcacgtgaaggaattggtgaacatgatcctgatgaagatgggctttagcggtatcgtggtgcatcaggagtccgtttgcgccacatacgggtctgggttgagtagtacatgcattgtcgacgtaggagaccagaagacctccgtttgctgcgtcgaagacggggtgtctcaccgcaacacgcggctgtgtctggcctacgggggaagcgatgttagcaggtgcttctattggctgatgcaacgggctggtttcccataccgagagtgtcagctgactaataagatggactgtctgctgctccagcacctgaaagagaccttttgtcatctggatcaggatattagcggcctgcaggatcatgagtttcagattagacatccagattctcccgctctgctgtatcagttccgactcggggatgaaaagctgcaggctcctatggcactgttctacccggctacctttggaatcgtgggacagaaaatgactacattgcaacatcgcagtcagggggatcccgaggacccgcatgatgagcactacctgttggcgacccagtcaaaacaggagcagtcagctaaagccaccgctgataggaaatccgcaagtaagccgatagggttcgagggtgatctgcgggggcagagctcagatctcccagagaggcttcactctcaggaagtagatttgggtagcgctcagggggacggactgatggctgggaatgactccgaggaggcactgactgccttgatgagccgcaagaccgcgataagtctgttcgaggggaaagcattgggccttgacaaggctattctgcacagtatcgattgctgctccagcgatgatacgaaaaagaagatgtactcttcaattcttgtggtgggtggcggcctcatgttccataaagcccaggagttcttgcagcatcggattcttaacaagatgccaccctcttttagacgaattattgaaaatgtggatgtgatcacccgacctaaggacatggaccctaggctgatagcttggaaggggggagccgtgctggcttgcttggacaccacgcaggagctgtggatatatcagcgagagtggcagagatttggcgtgcggatgctgcgggagcgcgcagcctttgtgtgg

SEQ ID NO: 190 - DNA, 1008 bp, synthetic construct
  source 1..1008: mol_type = other DNA
gccaccatggccgaatgtaagcgaccccctgaggcattcgggtttgaacaggccacaagggaatacacactccagagctttggggaaatggctgattcatttaaagccgactatttcaacatgcccgtgcacatggtgcctactgaactcgtcgagaaggaattctggagactggtgaacagtatcgaggaggatgtgactgtcgagtacggagccgatattcactctaaagagtttggctcaggatttcctgtgagcgacagcaagcggcacctgactcctgaagaggaagagtacgccacttctgggtggaacctcaacgttatgcctgtccttgaacagtctgttctgtgccacataaatgcggacatcagcggtatgaaagtgccctggctctacgtgggcatggtgttcagtgcgttctgctggcatatcgaggaccactggtcctactccatcaactacctgcattggggagagcctaaaacttggtatggggtaccatctcttgccgccgaacacctggaggaagtgatgaaaaagctgacaccggagctgttcgactctcagcctgacctgcttcatcaactcgtgactttgatgaaccccaacacactcatgagccatggggtgcctgttgtcagaacaaatcagtgcgcgggcgagttcgtcatcaccttccctagggcttaccactctgggttcaaccaaggctacaactttgctgaggccgtcaacttctgcactgccgattggctgccagcagggcggcaatgtatcgagcactataggcgcctgcggcgatactgcgtgttttcccacgaagaactcatctgcaaaatggccgcttgtcccgagaaactggacctcaacttggcagccgcggtgcacaaagagatgttcatcatggtgcaagaggagcgccgcctgaggaaagcactgctggaaaaggggatcaccgaggccgaacgcgaggcatttgagctgctgcctgatgacgaaaggcag

SEQ ID NO: 191 - DNA, 1392 bp, synthetic construct
  source 1..1392: mol_type = other DNA
gccaccatgggtcccgaccgggtgacagcacgagagctttgtgaaaatgacgatcttgcaacatcactggttctggatccctatttggggttccgcacacataaaatgaacgttagccccgtgccgcccctgagaaggcagcagcacctgcggtcagccctggagaccttcttgcgccagcgggacctcgaagctgcctacagagctctcaccctgggcggctggaccgctcggtacttccagagtaggggaccaagacaggaggcggcactgaaaacccacgtctaccgatacttgagagcattcctcccggaaagcggctttaccatcctgccttgtacaagatactccatggaaaccaacggggcaaagattgtgagcactcgcgcctggaaaaagaacgagaagctcgagctgcttgtgggctgtatagccgagctgcgagaggccgacgagggtctgctccgggcaggagagaacgatttttccataatgtatagtaccagaaagcggtctgcgcagttgtggctgggacctgccgcattcattaatcatgactgtaagcccaactgcaagtttgtgccagcagatggaaatgcggcctgtgtcaaagtactccgagacattgaaccaggcgatgaggtaacctgtttttacggtgaaggtttcttcggggagaagaacgagcattgtgagtgtcacacctgcgaacgcaaaggcgaaggcgcctttaggacaaggcctagagagccagccttgcctccaagaccactggataagtatcagctgagagaaacaaaacggcggctccagcaaggattggactcaggttctaggcagggcctgctcgggccacgcgcttgtgttcatccctcaccactgcgacgggaccccttttgtgcggcatgtcagccacttaggcttcctgcctgttccgcaagaccagataccagccccctgtggcttcagtggctcccccaaccacagcctagggtccgccccagaaaacgaaggcgccctaggcctaggcgcgccccagtgctctctacacaccatgcggctagagtgtctctgcaccggtggggggggtgcggaccacattgcaggctcagaggagaagcattggtcgcccttggccagcccccccacgccagatgggcaccccagcaagactggcattgggcccggcgctacggactgccttatgtcgtccgggtggacctccggcgactggctcctgcccctcccgctacaccagctccggcgggcacaccaggcccaattctcattcctaagcaggcactggcatttgctccgttttcaccacctaaacgcctgagactggtggtttcccacggctcaatcgatctggatgtggggggcgaggagctg

SEQ ID NO: 192 - DNA, 1599 bp, synthetic construct
  source 1..1599: mol_type = other DNA
gccaccatgtccggccgaggcgccggcgggttcccgctgccgccactttctcccggaggcggtgccgtggcagccgccttgggcgcccccccacctccagcgggccccggtatgttgccaggtcctgccttgcgaggccccggccctgctggaggagtggggggccccggcgcagctgcttttaggcccatgggccctgctggaccggcagcccagtatcagcgcccggggatgtctcctggcaatcggatgcctatggcaggtctgcaggtgggtccccccgctggcagtccatttggagctgcagcacccctgcgccccggcatgcctccaacaatgatggaccctttccgcaagcggttgctggtgcctcaggcccagcctcccatgcccgctcaacggagaggcctgaaaagacgcaaaatggctgataaagtgctcccacagaggattagggaactcgtgcccgaatctcaggcctacatggatctcctggcctttgagcgaaagcttgatcagacaatagctcgcaagagaatggagatacaggaggcaatcaaaaaacctctgacccaaaaacgcaagctgagaatctatatctctaataccttcagccccagtaaagccgagggcgatagcgcaggtactgctggaaccccgggcggcacgcccgccggtgataaggtggcttcctgggagctgcgggtggaggggaagctcctggacgaccccagtaaacagaaacgaaaattctcatctttctttaagtccttggtcatcgagttggacaaggaactgtacggacctgacaaccacttggtggagtggcataggatgcctaccactcaggagacagacggcttccaggtgaaacggcccggggacctcaacgtgaaatgtaccctgttgctgatgctggatcatcagcccccccagtataaactggatcctcggctggccaggctgctcggtgtacacactcagacaagggccgctattatgcaagccctttggctctatatcaaacacaatcagctgcaggacgggcatgaacgggagtacattaattgcaatcggtacttccggcagatattctcttgcggcagactcagattttcagaaattccaatgaagttggctggcctgctgcagcaccctgacccaattgtgatcaaccacgtgattagtgtggacccaaatgatcagaagaagaccgcttgctacgacatcgatgtcgaagtggacgacccattgaaagcacagatgagcaacttcctggcctccactaccaatcagcaggagattgcatctctcgacgtgaaaatccatgagaccattgaatctatcaatcaactgaagactcagcgagattttatgctgagtttttcaactgaccctcaggacttcatccaagagtggttgaggtctcaacgcagggatctcaaaattattactgacgtgatcggtaatcccgaagaggagcgaagggctgccttctaccaccagccttgggcacaggaggcggttggcaggcacatttttgccaaggttcagcagcgccggcaggagcttgagcaagtgctggggattagactgacc

SEQ ID NO: 193 - DNA, 2700 bp, synthetic construct
  source 1..2700: mol_type = other DNA
gccaccatggaccaggaagggggaggtgacggacaaaaggcgccttcatttcagtggaggaactacaagctcatcgtagatcccgcattggatccagcgttgaggcgaccctctcagaaagtctacagatacgatggtgttcactttagtgtgaacgattccaagtacattccggtggaagacctgcaagatcctagatgccacgtaaggagtaagaaccgggattttagcttgccagtacctaaatttaagctggatgaattctatataggtcagattcccctgaaagaagtgacgttcgcaaggcttaatgacaatgtccgagaaacatttctgaaggacatgtgcagaaaatatggggaagtggaagaggttgagatcctcctgcatccaagaactaggaagcacctcgggctggctagagttctgtttacttccacccgaggcgccaaagaaactgtcaagaaccttcatctcacctcagtcatgggcaatataatacacgcccagctggacatcaaaggccagcaacggatgaaatattatgaactgattgtgaacggttcctatacacctcagaccgtgccaactggaggcaaggcactgtcagaaaagtttcagggctccggtgctgccacagagaccgcggaaagccgaagaaggtcatcttctgacaccgcagcctaccccgcaggtacaactgcagtcggcacccccgggaacggcactccatgctcccaagacaccagcttcagcagctccagacaggacaccccaagttcctttgggcagtttacacctcaaagtagccagggtacgccttacacctccagaggatcaacgccatacagtcaggactccgcttattcttcatctaccacttctacctcatttaagcctcggagaagtgagaatagttatcaggatgccttcagcagaagacacttttcagccagtagtgcatcaacgacagcctcaacagcaattgccgctaccaccgcggctacagctagctcatcagccagcagctcctccctgtccagctcttccagtagcagcagcagctccagcagcagccagttccgcagctcagatgccaattatcctgcctattacgaaagttggaaccggtaccagaggcacacatcataccccccccgacgcgccacccgagaagagccaccaggggctcccttcgcagaaaatacggccgaacgcttcccaccctcatacaccagctacttgccacccgaaccgagccggcctaccgaccaggattacaggccacctgcctctgaggcccctcctcctgagcccccagaaccaggcggcggtggtggaggtggcggccccagtcccgagcgcgaggaagtcaggacatctcctcgcccagccagccctgccaggtctggcagtccagccccagagaccaccaacgaaagcgttccttttgcccagcacagctccctggactcccggatcgagatgctgctgaaggagcagaggagcaagttcagctttctggcttccgatacggaggaagaagaggagaatagctccatggttttgggcgctagagacactggttccgaggtgcccagcggctctggccacggcccatgtacccccccacccgcacccgcgaactttgaagatgtcgcgcccacagggtccggagaacctggcgcaacaagggagtctccaaaggctaatggacaaaatcaggcctccccgtgttcatccggtgacgatatggagatttccgacgacgacagaggcggttcccccccgccagccccgactcctccacaacagcccccgccaccacctcctccccctccccccccaccaccttacctggcgtcacttccccttggttatcctccgcaccagccggcatatcttttgcccccccgcccagatggtccgcctccacccgaataccctccacctcctccaccaccaccgcatatctatgactttgtgaacagtctggagctgatggatagacttggtgctcagtgggggggtatgcctatgagtttccagatgcaaacacagatgctgaccagactgcaccagctgcggcagggaaaaggccttattgccgcttctgctgggcccccaggaggcgcatttggggaagcctttctccccttccccccgcctcaggaggctgcctacgggcttccgtatgctctgtacgctcagggccaggagggccgcggagcttatagtcgggaagcctaccacctgccaatgcctatggccgctgaacccttgcctagctcttccgtgagcggcgaggaggccaggcttccgcctagggaagaagctgaacttgccgagggaaaaactctccctaccgccggaactgttggtagggtgcttgccatgctggtccaggagatgaaatccatcatgcagcgggatttgaaccggaaaatggtagagaatgtagcttttggggccttcgatcagtggtgggaatccaaggaggaaaaggccaagccatttcagaacgccgctaagcagcaggcgaaggaggaggataaggagaagaccaagctcaaggagcctggcctgctttctctggttgattgggctaagagcggcgggactactggaatcgaggcgtttgcatttgggtcaggattgagaggagcactccggctgcccagcttcaaagttaagcggaag

SEQ ID NO: 194 - DNA, 2436 bp, synthetic construct
  source 1..2436: mol_type = other DNA
gccaccatggagcccagcgaaatttccgaggctagcgaggaaaagaggccccggccgtctacccccgctgaggaagatgaggatgacccagaacaggaaaaggaggcaggcgaaccaggtagacctggaactaagccacctaagcgagacgaggaacgcgggaaaacccagggcaaacacagaaagtcctttgccctggattctgaaggtgaagaggctagccaggagagctcttccgagaaggacgaagaagacgacgaggaagacgaagaggatgaagaccgcgaagaagccgttgataccaccaaaaaggaaactgaggtctctgacggagaggatgaagagagcgactcctcctctaagtgcagcctgtacgcagactccgacggtgaaaatgacagcacatccgatagtgaaagttctagctccagctcctctagttcctcctcttcatcatcaagtagctcatcttcctcaagcagcagttccgaatctagtagtgaggatgaagaggaggaagagcgcccggccgccctgccttccgcgagcccccctcctagagaggttcctgtgcccactcctgcgcccgttgaagtcccagttccagagagagtagcaggctccccagtgacacccctccctgagcaagaggcctcacctgccaggccagccggaccaaccgaagaaagtcctccttctgctcccctgagacctcctgaacctccagccgggcctccagcacccgcaccacgacctgacgaacgcccatcctcccccatacctctcctgccgccccccaaaaaacgccgcaaaaccgtcagtttctctgccatagaagtggttccagcaccagaacccccccctgccacaccgccccaagccaagtttcccggacctgcctctcgaaaagcaccccgcggtgtcgagcgcaccattagaaaccttccactcgatcatgcttcccttgttaagagttggcccgaggaagtcagcaggggcggtcggagccgggccggcggacgcgggaggctgacggaagaggaggaagccgagcccggcacggaggtagacttggcggtgttggctgatctcgcccttactccagctcgacgcggcttgcccgcactgcctgccgtggaagattccgaggcgactgagaccagcgatgaagctgagaggccgaggcccctgctgagccatattctgctcgagcacaactatgctttggcagttaaaccaacgcctcctgctccagctctgcggccacccgagcccgtgccagctccagccgctctttttagttctcccgcggatgaggtcctggaggcccctgaggtagtggtggccgaagcagaagagcctaagccccaacagctgcagcagcaacgggaggaaggtgaggaagagggtgaggaggaaggggaggaggaggaagaagagtctagtgattcttctagttcatctgatggagagggggcgcttcgacggaggagcttgcgatcccacgcacggcggagacgcccgccacccccaccaccgccacctcccccccgcgcatatgagccaaggagtgagttcgaacagatgaccatactgtacgacatttggaacagcggcctggatagcgaggatatgagttatctgagactgacctatgagcgcctcctccaacagacctccggcgccgactggctgaacgacacccactgggtgcatcatactattaccaatctgaccaccccaaagaggaaacggagaccacaagatggaccccgagagcaccagacaggaagtgctcgctccgagggctactaccctatttctaaaaaagagaaggataaatatctggacgtgtgtcctgtatccgcccggcagctcgaaggggttgacacacagggtactaatagagtactgagcgaaaggcggagcgagcagcgcagactgctctctgcgattgggacttctgctatcatggactccgacctcttgaaactcaaccagctgaagtttagaaagaagaaactgcgatttggacgctctagaatccatgagtgggggctctttgccatggaacccattgccgcagacgagatggttattgagtacgtagggcaaaatatccgccagatggttgccgacatgagggaaaaaagatatgtgcaggaaggcatcggatcctcttacctgttccgcgtggaccacgatacaatcattgatgccaccaagtgtggtaacctggccaggtttattaatcactgttgcacaccgaactgctacgctaaggtaattaccatcgagagccagaaaaaaatagtgatttacagtaagcagcccataggggtggacgaagaaattacgtacgactacaaatttcctttggaggacaacaaaattccatgtctgtgtggtaccgagtcctgccgagggtcattgaac

SEQ ID NO: 195 - DNA, 1788 bp, synthetic construct
  source 1..1788: mol_type = other DNA
gccaccatggcagcaaatatgtacagagtgggggattacgtctattttgaaaactcaagttccaatccttacttgataaggagaattgaggagctgaacaaaactgcaagcgggaatgtggaagccaaggtcgtctgcttttatcggcgaagggacatatctaacacgctcatcatgctggctgataagcatgctaaagaaatcgaggaggaatctgagaccactgtagaggccgaccttacagataaacaaaagcatcagctgaagcaccgcgagctgttcctgagcaggcaatacgaaagcttgcccgctacccacatccgcggaaagtgttccgtagccctgctgaacgagaccgagagcgtgctcagttatttggacaaggaggacaccttcttttacagcctggtgtacgacccaagcctcaaaaccctgttggcagacaaaggagagatacgagtcggccccaggtatcaggctgacatccccgaaatgctgctggaaggtgaaagcgatgaaagagaacaatcaaagctggaagttaaggtgtgggatccaaattctccccttacagatagacagatcgatcagtttctcgtcgtggctagggctgtcggtacatttgcccgggctttggactgtagctccagtgttcgccagccctctctgcacatgtctgctgccgctgcttctcgagatattaccctttttcatgccatggataccctttacaggcactcttacgacctctcaagcgctatctctgtgctggttccccttggtgggcccgttctgtgtagagacgagatggaagaatggagtgcctccgaggcctctctcttcgaggaagccctggaaaaatatggcaaagactttaacgacattcggcaggacttcctcccctggaagagcctcacgtcaatcattgagtactactatatgtggaaaacaacagacagatacgttcagcagaagaggctgaaggctgccgaggccgagagcaaacttaaacaagtatatatcccaacctactccaaaccaaatccaaaccagatcagtaccagtaacggaaagcccggagctgtcaatggagccgtagggaccacatttcagccccagaatcctctgctgggcagagcgtgcgaatcatgctatgcgacgcagagccaccagtggtacagctgggggccacccaatatgcaatgccgactgtgtgcaatttgttggctgtactggaagaagtatggaggcctgaagatgcctacccagtcagaggaagaaaagctttccccatcccccacaacagaagatccccgggtccgctcccacgtctccaggcaggctatgcagggcatgcccgttaggaatacaggatccccgaagagcgcagttaaaacccggcaagcttttttcctccataccacgtatttcacaaagtttgcccggcaagtgtgcaagaacaccctgcggcttcggcaggccgcacgacggccattcgtggccattaactatgccgcaatcagggcagagtacgccgaccgccacgccgaacttagtggaagccccctcaaaagtaagtctactcgcaagccactggcctgcattatagggtatctggaaattcacccagcaaagaaaccaaacgttatacggtcaactccctctcttcagacacctaccacaaaacgcatgttgaccacccctaatcacacctctctgtctatattgggcaagcgaaattactctcatcacaacgggctggacgaactcacctgttgtgtcagcgat

SEQ ID NO: 196 - DNA, 1221 bp, synthetic construct
  source 1..1221: mol_type = other DNA
gccaccatgcccaaggggatccacgagcaggaactgtcttattttgctgttttccggcgcgtgtatgttcagagagacgaggttcggcagatcgcctcaatcgtgcaaagaggagaacgggatcacaccttcagagtgggcagcctcatttttcacactataggtcagctgctgccccagcagatgcaagcctttcactctccaaaggccctgtttcccgtgggctacgaggctagccgactttattggagcacacgctacgctaacaggcgctgtaggtacttgtgttctatcgaggagaaagatggccgaccagttttcgtcatcaggattgtggagcagggccacgaggacctggtgctgtctgatataagccccaagggcgtttgggacaagatcctggaacctgtcgcctgtgtcaggaagaagagtgagatgctccagctgtttcccgcctacttgaagggtgaagacctcttcgggcttaccgtcagcgctgttgctcgcatagccgaatccctgcccggagtagaagcctgcgaaaattacacatttcgctacggtcggaaccccttgatggagctgccactggccgtaaatccgactggctgcgccaggagtgagcccaaaatgtccgcacacgtgaaacgcttcgtcctgaggccccatactttgaattccacaagtactagcaaaagctttcaaagtacagtaacaggcgagctgaatgcaccatactcaaagcagtttgtgcattctaaatccagccagtacaggaagatgaagactgagtggaaaagcaacgtataccttgctcgctctagaattcagggcctgggcctttatgccgcaagagacattgaaaaacacacaatggttatagagtatatcggcactattattcgcaacgaggtggccaatcggaaggagaagctctatgagtctcaaaacagaggcgtgtacatgttccgcatggataacgaccacgtcatcgatgctactctcacaggcgggcccgctagatacataaaccatagttgtgcgcctaactgcgtggcggaggtggtgaccttcgagcgcggacataagattatcatctccagctcccgacgcatccaaaagggcgaagagctctgttacgactataaattcgactttgaagatgaccaacataagatcccctgccactgtggggcggtgaattgcagaaagtggatgaac

SEQ ID NO: 197 - DNA, 2913 bp, synthetic construct
  source 1..2913: mol_type = other DNA
gccaccatgcacggcccatctattatgaagaaaagacgcggaagttccaaaggacatgacacacacaaaggaaaacctgtgaagacgggcagcccaaccttcgttcgagaactccgcagcaggacttttgattccagcgatgaagtgattttgaagcccaccggcaatcagttgactgttgaatttctggaggagaacagcttttcagtgccaatccttgtcctgaaaaaggatggcctgggaatgactctgcccagtcctagtttcaccgtacgcgatgtggagcattacgtcggttccgataaggagatcgatgttatcgacgtgacgcgccaggccgactgcaagatgaagctgggtgattttgtcaaatactattactccggaaaacgggaaaaggtactcaatgtcatttccctcgagttcagtgacactagactgtccaatctcgtggaaactcccaagatcgttaggaaactttcttgggttgagaatctttggccagaagagtgcgtgttcgaacggccaaacgtgcaaaaatattgcctcatgtccgtgcgagattcatataccgattttcacatcgattttggtggcactagtgtgtggtaccacgtgctgaaaggagagaagatattctacctgatcagacccactaatgcaaaccttacactgtttgagtgctggtcctcttcatccaaccaaaacgaaatgtttttcggtgatcaggttgacaaatgctataagtgttcagtcaaacagggacagaccctgtttattccaacaggatggattcatgctgttctgaccccggtggactgtctcgcatttggaggtaattttctgcactcacttaatatagaaatgcagctgaaagcatatgagatcgagaaacggctcagtactgcagacttgttcagattcccaaactttgaaacaatttgttggtatgtgggcaaacacatcctggacatatttagggggctgagagagaatagaagacatcctgcgtcttatctggtgcacggcgggaaagccctgaacctcgctttcagagcatggacccgcaaggaagcactgcccgatcacgaggacgaaattcccgagaccgtaagaaccgtacagctgattaaggacctcgccagggagatcaggttggtggaggacatatttcagcagaacgtaggaaagactagcaacatattcggcctgcaacggatctttcctgcagggagcattcccctcacccggcccgcgcactctacatccgtcagtatgtctagactttccctgccgtctaaaaacggaagtaagaaaaaggggcttaagcctaaggaacttttcaaaaaagccgaaagaaaaggcaaggagagttctgctcttgggccagccgggcaacttagctacaacctgatggatacatatagccatcaggcgctgaagactgggtcttttcagaaagccaaatttaacataacaggcgcatgtctcaatgacagtgacgatgactctcctgacctcgacctggatgggaatgaaagtccgctcgcccttcttatgtcaaatggctccacgaagcgggtaaagtccttgtccaagagccgacgaacaaagattgccaagaaagtggacaaggcaagactgatggccgaacaggtgatggaagatgagtttgaccttgattccgatgatgagctccagattgacgagcgacttggtaaggagaaggctacgctgatcattagacccaagttcccccggaaactgccacgggccaaaccttgctccgaccctaacagggtgagggaacctggggaggtggaatttgacattgaggaagattacaccacagatgaggacatggtggaaggcgtagaaggcaagttgggaaatgggagcggcgcaggagggatattggatctgctgaaagcatctcgccaggtcggaggtcctgactatgctgctcttactgaagctcctgccagcccatctacccaagaagccatccagggtatgctgtgtatggccaatctgcagagctcttcctctagccccgcgacctcttctttgcaggcctggtggaccggcggccaggacagatcctccgggtcttccagcagcggactgggaacagtgtccaacagtcctgcttcccagcggacccctggcaaaaggcctatcaagcggcccgcttattggcgcactgaatctgaagaggaggaggaaaatgcgagtctggatgaacaagatagtctcggggcttgttttaaggacgccgaatatatctacccctcacttgagagtgatgacgacgaccctgctctcaaaagccgcccaaagaagaagaaaaattcagacgatgcaccctggagccccaaggccagagttacacccaccctccccaagcaagataggcctgtacgcgagggaactcgcgtggcgtccattgagactggactggccgccgccgccgcaaagttggcccaacaagagctgcaaaaggcccaaaagaagaagtacattaagaagaaacccctgttgaaggaggtggagcagcctaggccccaggactccaacctcagcctgacagttccagcgcctaccgtcgctgcaaccccacagctcgtcaccagctctagccccttgccaccccctgaacctaagcaggaagcactgtccggcagcctggcagatcatgaatataccgctcgacctaacgctttcggcatggctcaagccaaccggtcaacaactccgatggcacctggagtctttctgacacagcggaggccttccgtcggatctcagagcaaccaggccggccaaggtaagaggccaaagaaaggcctcgctaccgccaagcaaaggctgggaaggatcttgaagatccataggaatggaaaattgctgctg

SEQ ID NO: 198 - DNA, 1281 bp, synthetic construct
  source 1..1281: mol_type = other DNA
gccaccatggcgagcaaagagatgtttgaagatactgttgaggagagagtgattaacgaggaatataagatctggaaaaagaatacacctttcctttatgatcttgtgatgacccatgcactgcagtggccatccttgaccgtgcagtggcttcctgaagtgaccaagccggagggcaaagactatgcattgcactggctggtattgggcacccatactagcgacgagcagaatcacctggtagtagcaagagtgcacatacccaatgacgacgctcagtttgatgcgtcccactgtgacagtgataagggagagtttgggggattcggctccgttacaggtaaaatagagtgcgagatcaaaattaaccatgaaggtgaagtgaatcgggctaggtatatgccgcagaacccgcatatcatcgcaaccaagacacccagttctgatgtgctggtgtttgactacactaaacatcctgctaagcccgatccttccggtgaatgcaaccccgatctgcgcctcagagggcaccagaaagaaggatacggcctgtcttggaattcaaatctctccgggcatttgctgagcgctagcgatgaccacactgtttgtctgtgggacattaatgccggaccaaaggaagggaaaattgtggacgccaaagccatattcactggccactccgccgttgttgaagatgtggcttggcaccttcttcatgaatccctcttcgggtccgtagccgatgaccagaaactgatgatctgggatactcgctccaataccacatccaagccctcacatctcgtggatgcccacaccgccgaagtgaactgcctgtctttcaatccctattccgagtttatcctggcaactgggtctgcggacaaaacagtggccctctgggatctgcggaatctgaagctgaaacttcatacattcgaaagtcataaggacgaaatctttcaagtgcattggtctcctcacaatgaaaccatactggcttcttctgggaccgacaggcgccttaacgtatgggatctgtcaaagattggggaggaacagtctgcagaagatgctgaggacgggccacctgaattgctgtttatccacggtggacataccgctaagatttccgacttttcctggaacccaaatgagccttgggtcatttgcagcgtgtccgaggacaacattatgcaaatatggcagatggctgagaacatttacaacgacgaagagtctgacgtcacaacatctgagctggagggacagggcagt

SEQ ID NO: 199 - DNA, 1401 bp, synthetic construct
  source 1..1401: mol_type = other DNA
gccaccatgccaaagaaagctaagcctacgggaagtgggaaggaagaagggcctgccccctgcaagcagatgaaactggaggccgccggaggaccctcagccctgaattttgatagcccaagctcactcttcgagagcctgatttcaccaatcaaaacggaaacgttcttcaaggagttttgggagcagaagcctctgctcatccagcgcgacgatcctgctttggcaacctactacggatcccttttcaaactcacagatttgaaatccctgtgcagcaggggcatgtactatgggcgcgacgtgaacgtctgtagatgtgtgaatggcaagaagaaagtcctgaacaaggacgggaaggctcacttccttcagcttcggaaagatttcgaccaaaaaagggctactatccagttccaccagccacagaggttcaaggatgaactctggaggatccaagagaagttggaatgctacttcggatccctggtcggctccaacgtatatattactcccgccggatctcagggcctgcctccgcattacgatgacgtggaagttttcattctgcagttggagggggaaaagcactggaggctgtaccatcctaccgttcctcttgcccgcgagtacagtgtggaggccgaagaacggatagggcgccccgtgcatgagtttatgctgaaacctggtgacctgctgtacttccctcgcggaacaatccatcaggcagatactccagctgggctcgcccattcaacacatgtgaccatcagcacctaccagaacaactcttggggcgatttcctcttggatacaatctccggccttgtctttgataccgccaaggaggacgtagaattgaggaccgggatcccgagacagctgcttctgcaagtggaatcaaccaccgttgctacgcggagacttagcggatttctccggacccttgctgaccggttggagggcaccaaagaactgctgtcttctgatatgaaaaaagactttattatgcatcggttgcctccttactctgccggggatggagccgagctttcaactccgggtggcaaactgccacgcctggatagtgtcgtccggctgcagtttaaggatcacatcgtactgactgtgttgcccgatcaggaccagtcagacgaggcacaagagaaaatggtgtacatctaccattctctcaagaactccagagagactcacatgatgggcaacgaagaagaaaccgagttccatggtctcaggttcccactcagccatttggacgccctgaagcagatctggaatagcccagctattagcgttaaagatctgaagctgacaaccgacgaagagaaggagtctcttgttctgtctctctggaccgaatgtctgatccaagtcgtg

SEQ ID NO: 200 - DNA, 1305 bp, synthetic construct
  source 1..1305: mol_type = other DNA
gccaccatgcgcggcattaagagtaggtacaaagactgcagtatggcagcattgactagtcacttgcaaaatcagagtaataattcaaactggaatctgagaacacgaagtaagtgcaaaaaggatgttttcatgcccccatcttcaagtagtgagctgcaagaaagtcggggcctgagcaatttcacctccacgcacttgctcctgaaagaagacgaaggggtcgacgatgtcaacttccgcaaagtgcgcaagccaaagggtaaggtgaccatcctcaaggggatccctattaaaaaaactaaaaagggctgcagaaagagttgctccggctttgtacagtctgattcaaaaagggaatccgtgtgcaataaggcggatgcagagagtgaaccggttgcacaaaaatctcagctggacagaacggtctgcatcagtgatgcgggagcttgcggggagactctcagtgtgacgtcagaggagaatagcctcgtcaagaagaaggagagaagcctcagctctggctccaacttctgtagtgagcagaagacgagcggcatcattaataagttttgctccgctaaagacagtgaacacaatgagaagtacgaagatactttcttggaatctgaggagattggtactaaagtggaagtggtggagcgaaaagaacatctgcataccgacatcttgaaacgcggctccgagatggacaacaactgcagcccaacaaggaaggactttactggggaaaagattttccaagaggacactattccaagaacccaaatcgaaagaagaaagacaagcctgtacttttctagcaagtacaataaagaggctctctcaccaccgcggaggaaggccttcaagaaatggacccctcccaggtctcctttcaatctcgttcaggaaacactctttcacgatccttggaaattgctgattgctacaatctttctgaacagaacatccgggaagatggcgatccctgtgctgtggaaatttctggagaaataccctagtgcagaagtcgcccgaaccgctgattggagagacgtttcagagttgctgaaacccctgggactctacgacctgagggcgaagacaatcgtgaagttttccgatgaatatctgacaaagcaatggaaatatccgattgaacttcatgggattggaaagtacggtaacgattcatacaggatcttctgcgtcaatgaatggaagcaggtacacccggaggatcacaaactgaacaaatatcatgactggctctgggagaaccatgaaaagcttagcttgagc

SEQ ID NO: 201 - DNA, 2418 bp, synthetic construct
  source 1..2418: mol_type = other DNA
gccaccatggacctgccagtcgatgagtggaagtcatatcttctgcagaaatgggcttccctccctactagcgtgcaagtgaccatttctaccgccgaaacactgagggacatctttctgcactccagttcactgcttcagccagaggacgagctgttcttgaaaaggctgtcaaagggctacctggtcgggaaggattccgatgctcccctgttctatcgagaggaagggaataaaaagtttcaggagaaggattataccggagccgccgtgctctacagtaaaggcgtaagccactcccggccaaatactgaggacatgtcactgtgtcacgccaatcgctccgcggctcttttccatctcgggcagtatgagacgtgcttgaaagacattaatcgcgcgcagactcatggctacccggagcggctccaacctaagatcatgctgagaaaggccgagtgcctggtggctcttggccggctccaggaggcctcccaaaccatcagtgatctcgaacggaattttacagccacccctgcccttgccgacgtcctgcctcagacactgcaacgcaatctccacaggctcaagatgaaaatgcaggagaaagatagcctgaccgaatccttccctgctgcactggccaagaccctggaggacgccgctctgcgggaagagaacgagcagctctccaatgcctcaagcagtatcgggctttgtgtcgatccactgaaaggaagatgcctggtggctaccaaggacattctccctggtgagcttttggtccaagaagacgcctttgtgtcagtcctgaaccccggagagctccctccaccccaccacggtctcgacagtaaatgggatacaagggtaactaacggagacttgtattgccacagatgccttaagcataccctggcaaccgttccctgtgatggttgcagctatgccaagtactgttctcaagagtgcctccagcaggcctgggagctctatcaccggaccgaatgcccactgggggggctcctgctgacgttgggagtgttttgtcacatagcccttcgcctcactctgctggtaggcttcgaggatgtcagaaagatcatcaccaaactgtgcgataagatcagcaacaaggatatctgcctgcctgagagcaacaatcaagttaaaaccttgaactatggtttgggagaatccgagaaaaacggcaacatcgtggaaacccctattccaggctgcgacattaacggcaaatacgagaataactataatgcagtgtttaacctcctcccccacaccgagaatcattcccctgaacacaagttcctctgcgcgctgtgtgtgtccgctctctgtaggcagctcgaggctgcaagcctgcaggctatccccacagaacgcatagtgaacagctcccagcttaaagccgctgtgaccccagaactctgccccgacgtgaccatttggggtgttgctatgctcaggcatatgctccagctgcagtgtaacgcccaggcaatgacaacgatacagcacacaggacccaaagggagtatcgtgacagattctcgccaggtgcggctggccactggaatctttccagtaatatccctgttgaaccatagctgcagcccaaacacttcagtctcctttattagtactgttgctacaatacgggcttcacagaggattagaaagggccaggagatcctccactgctatggccctcacaaatctagaatgggggtggccgaacggcaacagaagctccggtctcagtatttctttgactgcgcctgccctgcctgtcaaaccgaagctcaccgaatggcggcaggccctcggtgggaggctttctgctgtaacagctgtggcgccccaatgcagggggacgacgtccttaggtgcggttccagatcctgtgctgagtccgcggtctctagagatcacttggttagcaggctccaagacctgcagcagcaggtgcgcgtcgcgcagaagcttctgcgcgatggtgagctggaaagagccgtgcagcgcctgtcaggctgccagcgggacgctgagtcttttctgtgggccgagcacgcggtcgtgggcgagatcgcagatggcctggcacgcgcctgtgccgcgctgggcgattggcaaaaatcagccacccatctgcagcgcagtctttacgtggtcgaagtcaggcacgggccgtccagcgtcgagatggggcacgaactgttcaagctcgcccaaattttctttaacggattcgccgtgcctgaagcgcttagcacaattcaaaaggcggaggaagtgctgtccctgcactgcggtccctgggacgatgagatccaggagctgcagaagatgaaaagttgtctcctggaccttcctcctacccctgtgggaccggcactg

SEQ ID NO: 202 - DNA, 846 bp, synthetic construct
  source 1..846: mol_type = other DNA
gccaccatgttgggacagcaacagcaacagctctattcttctgccgcccttttgactggggaaaggtcaaggctgctgacttgctatgttcaagactatctggaatgtgttgagtcactgccccacgatatgcagagaaatgttagcgtgcttcgcgaactcgataataagtaccaggaaactttgaaggagattgacgatgtgtatgagaaatacaagaaggaagatgatctgaatcagaaaaaaagattgcagcagctgctgcagcgagccctcattaactctcaggagcttggagatgaaaagatccagattgtgactcagatgctggaacttgtagagaacagggcacgacagatggaactccactcacaatgctttcaggatcctgcagagtctgaaagagcgagtgacaaggcgaaaatggattccagccagcctgaacgctcttccagacgccctcgccggcagaggactagcgagtctagggacctgtgccacatggcaaatgggatcgaggattgcgatgaccagcctcccaaggagaagaagagcaagagcgcaaagaagaagaagcgctcaaaggcaaagcaggaacgggaagcctcccctgtggagtttgccattgaccctaacgagcccacatattgcctttgtaatcaggttagctacggggagatgatcggctgcgacaatgagcagtgccccatagagtggttccactttagctgcgtgtctcttacatataaaccaaagggtaaatggtactgccccaaatgcagaggggataacgaaaaaacgatggataagtccaccgaaaaaaccaagaaagacagaagaagcagg

SEQ ID NO: 203 - DNA, 1119 bp, synthetic construct
  source 1..1119: mol_type = other DNA
gccaccatggctgcagccgaggccgccaattgtattatggagaatttcgtcgccactcttgctaacgggatgtctctgcagccaccactcgaggaggtttcctgtggccaggctgagagcagcgaaaaacctaatgcagaggatatgacctcaaaggactactattttgactcctacgcccatttcggcattcacgaggagatgctgaaagacgaagttagaacgctcacatatcgaaactccatgtttcacaacagacacctgtttaaagacaaggtggtcctcgatgtgggctcagggactggcattttgtgcatgttcgctgcaaaggccggtgccagaaaagttattggcatagaatgcagcagcatctcagactacgctgtgaaaatcgttaaggcaaataaactggatcacgttgtgaccatcatcaagggcaaggtagaagaggtggagctgcctgtagaaaaggtggatataatcatttctgagtggatgggatattgtctgttttacgaaagcatgctgaatacggtcctgtacgcgagagataagtggctggcacccgacggattgatattccccgaccgggcaacactgtatgtgactgccattgaggaccgccaatataaagactacaaaattcactggtgggaaaatgtctacggtttcgacatgagctgtatcaaggacgtggctataaaagagcctctcgttgatgtggttgatcccaagcagctcgtgactaatgcctgccttatcaaagaagtggatatctatactgtgaaagttgaagatctgacctttacctctcccttttgtctccaggtgaagagaaacgattatgtccatgccctcgttgcttacttcaatatcgaattcactcggtgccataaaaggacaggattttcaacctccccggaaagcccatacacacattggaaacagactgtgttctacatggaggactacctgactgtcaaaaccggagaggaaatcttcggcactatcggaatgcgaccaaacgcgaagaataaccgagatctggactttactattgatctcgacttcaaagggcagctgtgcgagttgtcctgttcaactgattataggatgcgg

SEQ ID NO: 204 - DNA, 1800 bp, synthetic construct
  source 1..1800: mol_type = other DNA
gccaccatgacatttcaggcatcacaccggagtgcctggggaaagtccagaaaaaagaactggcagtacgagggcccgacccagaagctgttcctcaagcgaaacaatgtgtccgcacccgatggtccttccgacccctccatatctgtctcaagtgagcaatcaggtgctcaacaaccacccgcgcttcaggtggaaaggattgttgacaaacgcaagaacaagaaaggaaagactgagtacctggtgaggtggaaaggctacgactccgaagacgatacatgggagccagaacagcacctggtcaattgtgaggaatatatccatgatttcaaccgacggcacacggagaaacagaaagagtctacactcacacgcacaaataggaccagcccaaataacgccaggaagcaaattagccgcagcacaaactccaacttctccaaaactagcccaaaagctctcgttataggcaaagaccatgagtcaaaaaattctcagctttttgccgcctcccaaaaatttcgcaaaaacaccgcccctagcctgtcaagtagaaaaaacatggatctggccaaaagcggcattaagattcttgtgcccaagtctccagtaaagtcacggaccgcagttgatggattccagagcgaatcacctgaaaagcttgaccccgttgaacaggggcaggaagacactgttgcgcctgaggttgcagctgagaaaccagttggagccctgctgggacccggtgccgaaagggcaaggatgggaagccgccccaggatccaccctctggttccgcaagtgccagggccagtgactgccgccatggcgactggattggcagtgaacggtaagggcacaagtccatttatggacgctctgactgccaatggtacaaccaatatacaaacctccgtaacaggagtgacggcttctaagagaaagtttattgatgatcggcgggaccagccgtttgacaagaggctgcggttctctgtccgacagacagaaagcgcctatcgctaccgcgacatagtagtgaggaagcaagatgggttcacccacatattgctcagcaccaaatcctcagagaataatagcctgaacccagaggtcatgagagaggtccaaagcgctctgagtactgccgctgctgatgattcaaagctggtcctcctctctgcggtcggcagtgttttttgttgtgggttggactttatttatttcattcggcgcctgaccgatgaccggaaacgggagtccaccaagatggccgaagccatcagaaactttgtgaacactttcattcagtttaagaagccaataattgtagccgtcaacggcccggcaattgggttgggcgctagtatcctgccactctgtgacgtggtgtgggccaatgaaaaggcttggtttcagacaccctacaccacgttcgggcagtcccctgatggttgctccacagttatgttccctaagattatgggaggagcttctgctaacgagatgctgttgagcggccgaaaactcactgcacaagaagcctgcggaaaggggctggtcagccaggtgttctggccaggtactttcactcaagaggtcatggtcagaatcaaagaactggctagctgtaatccagtcgtcttggaggagagcaaggctctggtcaggtgtaacatgaaaatggagctcgagcaggcaaacgagcgcgaatgcgaggttctgaaaaaaatctgggggtcagctcagggcatggatagtatgctcaagtatctgcagaggaaaatcgacgaattt

SEQ ID NO: 205 - DNA, 2016 bp, synthetic construct
  source 1..2016: mol_type = other DNA
gccaccatgtacaaagccaaggaacgcaagtccagccgggacaaggagctctacgcttggatgaagtgcgtgaagggccagccccacgaccataaacatctgatgcctacccagattatacccggctcagttttgacagacttgctggacgcaatgcacaccctgagagagaaatacggtatcaaatcacactgccactgtacaaataagcagaacttgcaagtcggaaatttccctacgatgaacggcgtgtctcaagtgctccaaaatgttctgaatcactccaacaagattagcctgtgcatgcccgagagtcaacagcaaaacacaccgccgaaatccgagaaaaacggcggatccagccccgaatcagacgtaggaaccgataataaattgacacctcccgagtcccagtctccccttcattggctggccgaccttgcggagcagaaggctagagaggaaaagaaagaaaacaaagagttgactctcgaaaaccagattaaggaagagagagagcaagacaattccgaatcccccaatggacgaacatcccctctcgtttcccaaaacaacgagcagggctctacattgagagacctgctgaccacgacggccggcaagctgagagtcggcagcactgatgccggcatagcctttgctcccgtctactcaatgggtgcaccatcatctaaatccggacggacaatgccaaatatccttgatgatatcattgcatccgttgtggaaaacaaaataccaccgtctaagacgagtaagatcaacgtgaaacccgaactgaaggaggagccagaggaatcaatcatcagtgctgttgatgagaacaacaaactgtatagcgatattccccacagttggatttgtgagaagcacatcctctggctcaaggattacaaaaacagttccaactggaaactctttaaggagtgctggaaacaaggccagcctgccgttgtctcaggtgttcacaaaaaaatgaatatttccctctggaaagcagagtcaataagtctcgactttggcgatcaccaggccgacctccttaactgcaaggactcaattatatctaatgccaatgtcaaagagttctgggatggttttgaggaagtgtccaagagacagaagaacaagagcggcgaaaccgtggtcctgaaactgaaagactggcccagcggtgaggattttaaaaccatgatgcctgcccgctatgaagacctccttaaatccctgccgctgcctgaatattgcaaccccgagggcaagttcaaccttgccagtcatttgcccgggtttttcgttcgccccgacttgggaccaagactgtgcagtgcctacggtgttgtggcagccaaggaccacgatatcgggacaaccaacttgcatatcgaggtgtccgacgtggtcaatatcttggtatacgtgggaatagcgaagggcaacggcattcttagcaaggctgggatcttgaaaaaattcgaagaggaggatttggacgacatactgcggaagcggttgaaagactcttctgaaatccccggagctctttggcatatctacgcaggtaaagacgttgacaaaattcgcgaattcctgcagaaaatctctaaagaacaggggcttgaagtacttccagagcacgatcccattcgagatcagtcttggtatgtcaataaaaagctgcgccagcgcctgttggaggaatacggcgttcggacttgcacactgattcagttcctgggcgacgcaattgtactgccagcaggggccttgcatcaagttcaaaattttcattcctgcatccaggtgacagaggattttgtgagccccgagcacctggttgagtcttttcatttgacgcaggagttgagactcctgaaggaagagattaactacgacgataaactccaagttaaaaatattctgtatcatgccgtgaaggaaatggtgcgggctctcaagatccacgaagacgaggtggaggacatggaggaaaat

SEQ ID NO: 206 - DNA, 1575 bp, synthetic construct
  source 1..1575: mol_type = other DNA
gccaccatggagacaatgaagtctaaagcaaattgcgcgcaaaacccgaactgtaatattatgattttccacccaacaaaggaagaattcaatgatttcgataagtacatagcatatatggagtcccagggcgcccaccgggcaggcctggcgaaaataattccacccaaggaatggaaagcgcgggaaacctatgataatattagtgaaatactcattgccactccgcttcaacaggtggctagtggaagagctggggtgttcacacaataccacaaaaaaaagaaggctatgacggtcggagagtatcgccacctggctaacagcaaaaaatatcagacacccccccaccaaaatttcgaagaccttgaaaggaaatattggaaaaatcgcatctataatagtccaatttatggggccgatatctccggttctctgtttgacgagaacaccaagcaatggaatttgggccatctgggtactattcaagacctgctggagaaagagtgcggggtcgtgattgaaggagtgaataccccctatctgtattttggaatgtggaagactacttttgcttggcatactgaggacatggacttgtattccatcaattacctgcatttgggtgaacccaagacctggtatgtagttcctccagagcacgggcagaggttggaaagattggctagagaactctttccaggatcttccagggggtgtggagcttttcttcgccataaagtggctctgataagccctacagtgctgaaagaaaatggtattccttttaatagaatcactcaggaggcaggcgaattcatggttacgtttccttatggctaccacgccgggttcaatcacggtttcaactgtgccgaagcgatcaactttgcaactccacgctggattgactatgggaaaatggccagccaatgttcatgtggggaggcacgggtgactttctctatggacgcattcgttaggatcttgcagcctgagcgctacgatctgtggaaaaggggccaagatagagctgttgttgatcacatggagccccgggtccctgcatcacaggaactcagcacccagaaagaggtccagctgccccgaagggcggctctgggcctcaggcagctgccaagccattgggcccggcatagtccctggccgatggccgctcggagtggcactcgctgccacactctggtttgctctagtcttcctagaaggtcagccgtttccgggacagccacgcaacccagagccgccgcagtgcactccagcaaaaaaccttcttcaacacccagctctaccccaggcccttccgcacagattattcaccctagcaacgggagacgcggccgagggcggccacctcaaaagctccgggcccaggagctcacactgcagacccccgccaagcgccctttgctggctggtactacatgtacagcctccgggcctgaaccagagcctctccccgaagatggagcactgatggataagccagtaccattgagcccaggcttgcagcaccccgttaaggccagcggctgttcttgggccccagtgcct

SEQ ID NO: 207 - DNA, 1272 bp, synthetic construct
  source 1..1272: mol_type = other DNA
gccaccatgagctttgtggagtgcccctaccactctcctgccgaacgattggtcgcagaggcggacgagggaggcccatctgcaatcacaggtatgggactgtgctttcgctgtctcctcttctccttctcaggtcgaagcggggttgagggcgggcgggtggatctgaatgtgtttggttctctcggactccagccatggattgggagctcaagatgctgggggggaccctgctcttccgccctgcgctgtgggtggttcagctcctggcccccccccagtaagtctgcaatcccaatcggcgggggttcccgaggcgcaggccgggtctctaggtggccaccaccccactggctggaggcctggcgcgtgtcaccactgccactttctccgctgagtcctgccactttcggccggggatttattgcagtggcagtcattcctggactctgggccagaggcagaggttgcagcagcgacagactgccccgcccggccgggccagcccggcggcagttccaggctgccagcctgctcacacgcggttggggccgagcatggccttggaagcagatcctgaaagagcttgacgaatgttacgagcgcttttctagggagacggacggtgcacagaagcgccgcatgctgcattgtgttcaacgcgccctgattcggtcacaggagctgggcgacgaaaagattcagatagtgtcccagatggtggagctggtggagaaccgcaccaggcaggtggattcacatgtggagctgttcgaggctcagcaggaactgggtgatactgccggcaattccggcaaagccggtgctgacaggccaaagggcgaagccgccgcccaggcagataaacccaacagcaaacgctccagaagacaacggaataatgaaaatagggagaatgcctcctcaaatcacgaccatgatgatggagcctccggaacacctaaggaaaaaaaggccaaaacttcaaaaaagaagaagaggagcaaagccaaagcagagcgggaagcctccccagctgatttgccaattgacccaaatgagcccacctattgtctttgcaaccaggtttcctatggggaaatgatcggatgcgacaacgacgaatgcccgatcgagtggttccactttagttgcgtgggcttgaaccacaaaccaaaagggaaatggtactgcccaaaatgccgcggagagaatgaaaaaaccatggataaagcccttgagaaaagcaagaaggaacgcgcgtacaaccgc

SEQ ID NO: 208 - DNA, 1788 bp, synthetic construct
  source 1..1788: mol_type = other DNA
gccaccatgggcaaaaagtccagggttaagacacagaaatcagggacgggcgccactgctacagtcagcccgaaggagattctgaatctcacctcagagctgctgcagaagtgtagtagccccgcccctggcccgggaaaagagtgggaggagtatgtgcagatccgaactctcgtcgaaaaaattcgcaagaagcagaaaggattgagcgtgaccttcgacgggaaaagagaggattattttcccgatctgatgaagtgggcttcagagaatggggccagcgttgagggcttcgagatggttaacttcaaggaggaaggatttggcctgcgagctacaagggacatcaaggcagaggaattgtttctgtgggttccccgcaagcttctcatgaccgttgaaagcgccaagaatagtgtgctcggtccgctttatagccaggaccgaatcttgcaggctatggggaacatcgcccttgctttccatctgttgtgtgagagagcatctcctaactcattttggcagccatatattcagaccttgccctctgaatacgacactcccctctatttcgaggaggacgaagtgcgctacttgcagagtacacaggccatccacgacgtcttcagtcagtacaagaacactgctcggcagtatgcttacttctacaaggtaattcaaacacacccacacgccaataagcttcctctgaaggatagcttcacttatgaagattatagatgggctgtgtcctcagtgatgactagacagaatcaaatccctacagaggacggttctagagtgaccctggcactgattcctctttgggacatgtgtaaccacacgaatggactgatcacaacaggctataacctggaggacgatagatgcgaatgcgtggccctccaggactttcgggctggagagcaaatctacatcttttacgggacgcgcagtaatgctgagtttgtgatccattctggttttttctttgacaacaatagtcatgatcgcgtcaagattaagttgggagtatcaaagagtgacagactgtacgcgatgaaagccgaagtgcttgccagagccggaatacccactagctccgtctttgcactccacttcactgagccacccatttccgcgcagctcctggcattcttgagagtgttctgcatgactgaagaagagctcaaggagcacctgctcggcgactctgccatagaccgcatctttacgttggggaacagtgagttccctgtgtcatgggacaatgaagtgaagctgtggaccttcctggaagatagagcttccttgctgctcaagacatataagacgacaatcgaggaagataagagcgtactgaagaaccacgatctgtccgtgcgcgcgaagatggccatcaagctcaggctcggtgagaaagaaatcctggagaaagcggtgaaatcagcggctgttaacagagagtattacagacagcagatggaggaaaaggcgcccctgcccaagtatgaggagtctaatcttggcttgctggagagcagcgtcggtgactcccggttgccactggtcctcagaaatctggaggaggaagctggggtccaggatgccctcaatattagagaagccattagcaaagccaaggccacggaaaatgggctggtcaacggtgaaaactccatcccaaacggaacgagaagtgaaaacgaatccctgaaccaggagtctaagagggctgtggaagacgccaaggggtccagctccgattcaaccgccggagtgaaggag

SEQ ID NO: 209 - DNA, 2151 bp, synthetic construct
  source 1..2151: mol_type = other DNA
gccaccatggcagctaacatgtatcgggtcggcgactatgtgtacttcgaaaattccagctcaaatccctacctgatccgcaggatagaagagctgaacaaaaccgccaatggcaatgttgaggcaaaggtggtgtgtttctacagaagaagggatatctcttcaaccctgatagcgctggcggataagcatgctactctcagcgtctgttataaagctggccctggtgccgacaatggagaggagggcgaaatagaggaagagatggaaaatccggagatggtagatctgccagaaaaactgaaacatcaacttcgacacagggagttgttcctgtctcgccagctcgagagccttccggcgacacacatcagagggaaatgctcagttacacttctgaacgaaactgagtcacttaagtcttatctggaaagggaggacttctttttttactctctcgtatacgaccctcagcagaagacactgttggctgataagggagagattcgcgtgggcaaccgctatcaggccgatataacagacctgctcaaagagggagaagaagacggccgcgaccaatcacgcctggaaacacaagtgtgggaagcccataatcccctgacggacaagcagatcgatcagttcttggtggtagcacgaagtgtgggcacatttgcccgcgctcttgactgttcttctagcgtcagacagccttccttgcacatgtccgccgccgcagcctcccgggacattactctctttcatgccatggacacactccataaaaacatctacgacatcagtaaggccatttctgccctggtgccacagggcggccccgtgctttgtcgggacgaaatggaagagtggagcgcttccgaggccaatctgttcgaggaggctctggagaaatatgggaaagatttcacagatatccagcaggattttctgccgtggaagtctctgacaagtattatagagtactactacatgtggaagaccaccgatcgatatgtccaacagaagcggttgaaagccgccgaggctgagagcaagcttaaacaggtgtacatccccaactacaacaagcctaaccctaaccagatcagtgttaacaacgtaaaggctggagtggtgaacggaacaggcgcaccaggacagtcccctggagccggacgagcttgtgagagctgttatactacccagtcctaccagtggtactcttgggggccaccaaatatgcaatgccgactttgcgccagttgttggacatattggaaaaagtatggaggcctgaagatgcctacacggctggatggcgagcggccaggacccaaccggtcaaacatgtcaccacatggtctgcccgcccgctccagcggcagccctaaattcgctatgaaaacacgacaagccttctacttgcacaccacaaagctgacacgcatagctcgccggctgtgtagagaaattctgcgcccttggcacgccgcaagacatccatatctccccatcaacagtgctgcgatcaaggccgaatgcactgcacgcttgccggaggccagccagagtcccctcgtcctgaaacaggcagttcgcaagcctctcgaagccgtgctgcgatacttggagacgcatcctcggccccccaaacccgaccccgtgaaaagcgtgagtagcgtgctgagcagcctgacccctgccaaagtggctccggtaatcaataatggcagccctacaattcttggcaagaggtcctacgaacagcacaatggtgttgacggcaatatgaaaaaaaggctgctgatgccatctagagggcttgcgaaccatgggcaggccaggcacatgggcccttcccggaacctcctgctgaatgggaagagctatcctaccaaagtgagattgatccgcgggggctctttgccgcccgtcaagcggagaaggatgaactggatcgatgcaccggatgacgtcttctatatggctaccgaggagacccggaagatccgcaaactgctgagttcctcagaaaccaaaagagccgctcgcagaccatataaacctattgcgctgcggcagtcccaggctttgccgcctcgccctccgcctccagcccccgtcaacgacgaaccaattgttatcgaggat

SEQ ID NO: 210 - DNA, 1242 bp, synthetic construct
  source 1..1242: mol_type = other DNA
gccaccatggccgagaatctgaaagggtgtagcgtgtgctgtaagtctagttggaaccagctgcaggatctctgcagactggcaaagttgagctgtccggcactgggaatcagtaaacggaacctctacgatttcgaggtcgaatatctgtgcgattataagaaaatccgggaacaggagtattacctggtgaagtggagaggctatcccgactcagagtctacttgggagccgcggcagaatcttaagtgcgtcaggatccttaagcagttccacaaggacttggagcgcgagctgctgcgacgccatcatcgaagcaagacaccccggcaccttgaccctagcctcgccaattatctggtgcagaaggccaaacagcgccgggctctgcggagatgggagcaggagcttaacgccaagcgcagtcacttgggccggataacggtggagaatgaggttgatcttgacggccccccccgggcgttcgtttacataaacgaatatcgcgtcggcgaggggattacactcaatcaggtggccgtcgggtgtgagtgccaggactgcctctgggctcctaccggcgggtgctgtcctggcgcgtctctccacaaatttgcctataacgaccagggacaggtcagactgcgggcgggccttcctatctatgaatgtaattctaggtgccgatgtgggtacgactgccctaatagagtcgttcagaaaggcatacgctacgacctctgtatctttcgcactgacgatggcaggggatggggagttcgcactctggagaaaatacggaaaaatagctttgttatggagtatgttggagagattattacaagtgaggaggccgaacgcaggggtcaaatttacgacaggcaaggcgctacctatctctttgacctggactatgtagaggatgtgtacaccgttgacgctgcttattacggcaatattagtcactttgtgaatcattcttgcgacccaaacttgcaagtctacaacgtgtttatcgacaatctggacgagcgacttccgaggatcgcattctttgccactcgaaccatacgggcaggcgaagagctgacattcgactataacatgcaggtggacccggtcgacatggagtctactagaatggacagcaattttgggctcgccggactccctgggtctcctaagaaaagggtccgaatcgagtgtaaatgtgggacggaatcatgtagaaagtatctgttt

SEQ ID NO: 211 - DNA, 744 bp, synthetic construct
  source 1..744: mol_type = other DNA
gccaccatgggatccggtgccgagggcgatggaggatggaggccaggaggcccaggggcagtggccgaagaagaaagatgcaccgtggagcgaagagctgacctgacctacgctgaattcgtgcaacagtacgcgttcgtgaggcccgtgatcttgcagggcctcaccgacaactcaagattcagagctctttgctcccgcgacaggctgctggcctccttcggggaccgagttgtccgactgtcaaccgctaatacctacagttaccacaaagtggacctgcctttccaagagtacgtggaacagctcctgcatccccaagaccccaccagtctgggcaatgatactttgtatttttttggagacaataacttcacagaatgggcctccctgtttcgccactatagcccccctccctttgggttgttgggcaccgctccggcatattcattcggtatagcaggagctggttccggggtgccatttcactggcacggaccagggtactccgaggtcatctatggcagaaagcgatggtttctgtaccccccagaaaaaaccccggaattccaccctaataagactaccctggcttggctgcgggatacatatccagcgctcccacctagtgcaaggccacttgagtgcactatcagagccggggaggtactttactttccagatcggtggtggcacgccaccctcaaccttgatacaagcgtcttcatttccacattcctggga

SEQ ID NO: 212 - DNA, 1083 bp, synthetic construct
  source 1..1083: mol_type = other DNA
gccaccatgttgtacctcgaggattacctcgaaatgatcgaacagcttcctatggatctccgagatcggttcacagaaatgagggagatggatctccaggtgcagaatgcaatggaccaattggagcaaagagtcagcgaattctttatgaacgctaaaaagaacaaacctgagtggagggaagaacagatggcctcaattaaaaaggattactataaggcactggaggacgcagatgagaaggtgcagctggcaaaccagatttatgacctggtcgatcgccacttgcggaagctggatcaggaactggccaaattcaagatggagctggaagccgataacgccggaatcaccgagattctggagcgcaggagccttgagctcgacacgccatctcagcccgtcaacaaccaccatgcacacagccacactcccgtcgagaagaggaagtacaaccccaccagtcaccatacaactaccgaccacataccagagaaaaagtttaagagcgaagccctcttgagcacactgacatctgatgcaagcaaagagaacactctggggtgtcggaataacaacagcacggcctcatccaataacgcctataatgttaacagttcacaaccgctgggctcctacaacatcggaagtctgagctctggtaccggggctggggcaattaccatggccgccgcccaggctgtgcaggctaccgcccagatgaaggaagggcgcaggacgtcatcactgaaggcttcctatgaggctttcaagaataatgatttccagttgggaaaagagtttagcatggcaagggagactgtgggttatagctcctcaagcgcccttatgactacgcttacgcagaacgccagcagctccgccgccgattcacgcagcggaaggaagtcaaagaataacaacaagagctcttcacagcagagctctagcagctcatctagttcatccttgagcagttgttctagctctagcaccgttgtgcaggagatctcccaacagactacggtagttccagaatcagatagcaacagccaggtggactggacctacgaccccaacgaa

SEQ ID NO: 213 - DNA, 1827 bp, synthetic construct
  source 1..1827: mol_type = other DNA
gccaccatggccgccaatgtgttcccctttcgagacgctagagccgcccctgatcccgtgctggaggccggtccggtggcccatggccccctgcctgtgcccctcgtgctggacaatggttcttttcaagtcagagctggttgggcatgtccaggacaggacccaggacctgaaccccgccttcagtttcgagcagtgtgtgcccgcggccggggaggagcccggggtgcatctggcccccaagtcggaaatgcactgggcagcctggaacccttgcgctggatgctgcggagccccttcgataggaatgtccctgtgaatttggaattgcaggagttgctgctcgattattcctttcagcacctgggggtaagtagtcaggggtgcgtcgaccatccaatagtgctgactgaagctgtttgtaacccactgtattcaagacaaatgatgagtgagttgctgttcgaatgttacggcatacccaaagtggcttacgggatcgattctctttttagcttttaccataataagccaaaaaactccatgtgttctggtttgatcataagctccggataccagtgcacccatgtactgcctattttggaaggccgacttgatgccaagaattgcaagagaatcaacctcggcggtagtcaggccgccggatatctgcagcggctgctgcagcttaagtatcctggccatctcgcggcaatcactctgtcccggatggaagaaattctgcatgagcactcatatattgctgaggattatgtcgaggagctgcataaatggcggtgtcccgattactatgaaaacaacgtgcacaaaatgcagctgcccttctcttctaaactgctgggatccacacttacaagtgaagagaagcaggagagacgccagcaacagctgaggcggctgcaggaattgaacgccagacgcagggaggaaaagttgcaactcgaccaggagcgcctggacaggctgctgtatgtccaggagctcttggaggatggccagatggatcagttccacaaagcactgatcgagttgaacatggactctccagaagaactgcagagctacattcaaaagctctctattgctgttgagcaggcgaagcagaaaattcttcaggccgaggtaaatcttgaggtcgatgtggtggactctaaaccagagacccccgatcttgaacaattggaaccgtcattggaggatgtggagagtatgaatgactttgaccctctgttttctgaggagacaccaggcgtggagaagccagtgactactgttcaacctgtttttaatctggctgcatatcaccaactcttcgtggggaccgagaggatacgggcccccgaaatcatatttcagcctagcctcatcggcgaagagcaggccggaatagccgagaccttgcagtatatccttgaccggtatcccaaggatattcaggagatgttggttcaaaacgtgtttctgacaggcggaaatactatgtaccctggaatgaaggccaggatggagaaggagctgctggagatgaggccctttaggagctcattccaggttcagctggcttccaacccagtccttgatgcttggtatggtgcccgagattgggctttgaatcatctcgacgataacgaagtctggattacccgaaaggagtacgaggagaagggcggagagtacctcaaagagcactgtgccagtaatatctacgtccccataaggctgcctaagcaggctagccggtctagtgacgcccaggcatcttctaagggctctgccgctggtggaggcggcgccggcgaacaagcc

SEQ ID NO: 214 - DNA, 1821 bp, synthetic construct
  source 1..1821: mol_type = other DNA
gccaccatggccgggccacagatgggcgggagcgccgaggaccacccgccaaggaagcggcatgctgcagagaagcagaagaagaagaccgtcatttatactaaatgctttgagttcgagtccgccacacaaaggcctatcgataggcagaggtacgacgagaacgaggatctgtccgatgttgaggagattgtcagtgtgcgaggcttttccctggaagaaaagttgcgctcacagctttaccagggcgatttcgttcacgccatggaagggaaagatttcaattacgagtatgtgcagagagaggcgcttcgggtgcccctgatcttccgggagaaggatggacttggcatcaagatgcctgatcccgatttcaccgtgcgggacgtgaagcttctggtcggctctcggaggctcgttgacgtgatggatgtgaacacacagaagggcacagagatgtccatgtcccaattcgtacggtattacgagaccccagaggctcaaagagacaagttgtataatgtaataagcctggaattctcacataccaagctggagcacctcgtcaaaaggcctaccgtcgtggatctcgttgactgggtcgataatatgtggccacagcatctgaaggaaaaacagaccgaagcaacaaacgcaattgctgagatgaagtaccccaaagtgaaaaagtactgcttgatgagcgttaaaggctgcttcactgactttcatatcgatttcggggggacctccgtgtggtatcacgtttttagaggtggaaagattttctggctgatccccccaactttgcacaacctcgcactttacgaggagtgggtgctgtccggaaagcagtccgacattttccttggcgacagggttgaaagatgtcagcggatcgaactgaagcagggctataccttcttcatccccagcggctggatacacgccgtttataccccagtcgatagcctggtcttcgggggtaatatcctccacagcttcaacgtgccaatgcaactgagaatctatgagattgaggaccgcactagggtgcaaccgaaatttcgctaccctttctactatgagatgtgctggtacgtactcgaaaggtatgtctactgcgttacccagagaagtcacctgacacaggaatatcagcgcgagtccatgctgattgacgccccccgcaagcctagcatcgatgggtttagttccgactcatggctggaaatggaggaggaggcatgcgaccagcaaccccaggaagaggaggagaaggacgaggaaggagaagggagagaccgcgcgccaaagcccccaacagatgggagtactagccctacctcaacaccaagcgaagaccaagaagccctgggtaagaagcccaaggctcccgcactcaggtttcttaagcgcactctgagcaacgaatcagaggaaagtgtgaagagcaccaccctggccgtagactatccgaagactccaacagggtcaccagcaaccgaggtttcagctaagtggactcacctgaccgaattcgagctgaagggcctcaaagctctggttgagaaacttgaatcccttcccgagaataagaagtgcgttcctgagggtatcgaagatcctcaggcattgctcgaaggagtgaaaaatgtccttaaggagcatgcagacgacgatccatcactggctatcaccggtgtcccggtggttacctggcctaaaaagacccccaagaatcgcgcagttgggcgcccaaaaggaaagcttggccctgctagcgccgtgaagttggccgccaaccggacgacagccggg

SEQ ID NO: 215 - DNA, 1842 bp, synthetic construct
  source 1..1842: mol_type = other DNA
gccaccatgggaaaaacagggaagcagaagcgcggacccgggtttaaatatgcaagcaacttgcctggctcactgctcaaggaacaaaaaatgaatcgcgataacaaggaaggccaggagcccgctaaaaggcggtccgagtgcgaggaggcaccgcggaggagaagtgatgagcactctaaaaaagttccaccagacggactgctgcgccggaaatccgatgatgtgcatctgcggaagaaaagaaaatatgagaaacctcaggagctgagcggtcggaaacgcgcatcctctctgcagacctcacctggcagctccagccatctgtctccccgacccccccttggctcttctctgtcaccgtggtggaggtcaagccttacttattttcagcaacagctgaagccagggaaagaagataagctctttcggaaaaaacggagatcatggaagaatgccgaggatcgcatggctctcgctaataagccactccggagatttaagcaggagcccgaagatgaactgccagaggcacccccgaagactagagagtctgaccacagcaggtcctcctcaccgacagcgggaccaagcaccgagggtgccgaaggacccgaggagaaaaaaaaagttaagatgagacggaagcggaggctgcccaacaaggaattgtctagggaactgtccaaggagttgaaccacgaaatccagcgaacagaaaactcactggcgaacgagaatcagcaacccattaaatcagagcctgagtctgaaggcgaggaaccaaaacggcccccaggaatttgtgaacgcccgcataggttctctaaaggtcttaatgggacaccccgagaactgcggcaccagctcggccccagtcttaggagccccccaagagttatatcccggcctcctcccagcgtgagtcctcccaagtgtattcagatggaacgacatgtgatacgacctccgccgatctcaccaccgcccgactcattgcctctggacgatggagccgctcacgttatgcatagagaggtgtggatggccgtgtttagttatctgagccaccaggatctgtgtgtgtgcatgagggtatgtcggacgtggaaccgctggtgctgtgacaaaagactgtggactcggattgatctgaaccattgtaagagcatcacaccactcatgctcagtgggatcattcggagacaaccagtgtctctggaccttagctggactaatatctccaagaagcagctgtcctggctgatcaatcgcctgccaggccttcgagatcttgtgctgagcggatgttcttggatagcagtcagcgccctttgttctagtagttgtcccctgctccgcaccttggatgtacagtgggtcgagggattgaaagatgcccagatgagggatctgctgtctccacccacagacaatcgcccaggacaaatggataaccggtccaaacttcgcaatattgtggaactgcgcctggcaggcctcgacattaccgacgcttctctgcgccttattatcagacacatgccactccttagcaagctccatctgtcatattgtaatcatgtcacagatcagtccatcaacctgctcacagcagtgggcaccacaacacgagattctttgacagagattaacctgtcagattgtaacaaggtaacagaccagtgtctttctttctttaagagatgtgggaatatatgccacatcgaccttagatattgcaagcaggtgactaaggaagggtgtgagcagtttattgcggagatgtctgtgagcgtgcagttcgggcaggtggaggagaagcttctgcagaagctctca

SEQ ID NO: 216 - DNA, 3168 bp, synthetic construct
  source 1..3168: mol_type = other DNA
gccaccatggagcaagacactgccgcagtcgcggccaccgtcgctgcagcagatgctactgcaacaatcgtggtgatcgaagatgaacagccaggaccctctacgtcacaggaggagggagctgcggctgcggcgactgaggctactgctgcaactgagaaaggtgagaagaaaaaggaaaaaaatgtctcatcatttcagctcaagttggcggcaaaagccccgaaatccgagaaggaaatggacccagagtacgaggagaagatgaaagccgatcgggctaaacggttcgagttcctcctcaaacagaccgagctgttcgcccacttcatccagccctcagcccagaagtctcccacctctcctctcaatatgaagctgggccgcccaaggattaagaaagacgagaaacagagcctgattagcgccggggactaccgccacaggaggaccgagcaagaggaggatgaagaactcctgtcagagagtaggaaaactagcaatgtctgcatacggttcgaggtcagtccatcatacgtcaagggaggcccactgcgggactatcaaataaggggcctgaattggttgattagcctctacgagaatggggtgaatggcatcctcgccgatgaaatgggcctgggcaagaccctgcagaccattgccctgctgggatatctcaagcactataggaacatccccggacctcacatggtgctggtgcccaaatctaccctgcacaactggatgaatgagtttaagagatgggtccccagcttgcgagtcatttgctttgtaggcgataaagacgcccgggccgccttcattagagatgagatgatgcctggtgagtgggacgtttgtgttacctcctatgaaatggtgatcaaagagaaaagtgtgtttaaaaaatttcactggaggtatctcgtcatcgatgaagcccaccggattaagaacgaaaagagcaagctgagtgaaatagtcagggagtttaagtctacaaacagactcctgctgacagggaccccgctgcaaaataatctccacgaattgtgggcactgttgaactttttgctgccagatgtgtttaattcagcggacgattttgatagctggttcgacacgaaaaactgcctgggggaccaaaagctggtggagcgccttcacgcggttttgaaacctttcctgctgagaagaattaagaccgatgtggagaagtcactgcctcccaagaaagaaatcaagatttacctgggattgagtaagatgcagcgcgaatggtataccaaaattttgatgaaggatatcgatgtccttaacagtagcggaaagatggataaaatgagactgctgaatattttgatgcagcttcggaagtgctgtaaccatccttacctgtttgacggcgccgagcccggtccgccatacaccaccgacgagcacatcgtgagcaactctggcaagatggtggtactggacaaattgctcgccaaattgaaggagcagggttcccgggtcctgattttttcccaaatgactcgcctccttgacatactggaggactattgcatgtggcgagggtacgaatattgtcggcttgacgggcaaaccccccacgaggaaagagaagataagttcctggaggtagaatttctgggccaaagggaagctatcgaagcattcaacgccccaaactccagtaagtttatctttatgttgtctacccgggccggaggccttgggatcaatctggcctccgccgacgtggtgattttgtatgactcagattggaaccctcaggtcgatcttcaggctatggatcgggcccacagaataggtcaaaaaaagcctgtcagggtgttcaggttgatcactgacaacaccgtggaagaaagaatagtggagagagccgagatcaagctgaggctggacagtattgttatccaacaaggcaggctgatagaccaacagagtaacaaactggctaaagaggaaatgctgcaaatgatccgccacggagccacccacgttttcgccagcaaggaatctgagctcaccgatgaagacatcaccaccattcttgaacggggagaaaagaaaacagccgagatgaatgagcgcctgcagaagatgggggagtcctccctgcgaaacttcaggatggatatagaacagagcttgtataagttcgagggagaggattacagggagaagcagaaactcgggatggttgagtggatagagcctcctaaaagggagaggaaagcaaattacgccgtcgatgcatacttccgcgaggctctccgcgtgagtgagcccaaaatccccaaggcgcctcgcccacctaaacaaccaaacgtacaagattttcaattcttccccccccggctcttcgagctgctggagaaagaaatcctgtactacagaaagacaatcgggtacaaggtcccacgcaatccggacatcccgaatcccgccctggctcagagggaagaacagaaaaagatcgatggtgctgagcctctgacacctgaggaaaccgaggaaaaggagaagctgctgacacagggtttcactaactggaccaagagggattttaaccagtttatcaaagccaacgaaaagtacgggcgggacgatatcgacaatattgctcgggaagtggagggaaaatcccctgaagaagttatggaatacagcgccgtgttctgggaaagatgcaacgagctgcaggatattgaaaaaatcatggcacagattgagaggggagaagcgcggatccaacggcgcatctccatcaagaaagcccttgatgccaaaatcgcccgatacaaagcgccgtttcaccaactcagaatacagtatggaacatcaaaagggaaaaactacaccgaagaggaagacagattccttatctgcatgctgcacaagatgggctttgatagagagaacgtctacgaggaactgaggcaatgtgttagaaatgcgccacagttcagatttgattggtttattaagagtcgaaccgcaatggaatttcaacggcgctgcaatactctgatcagcctgatcgaaaaggagaacatggaaatcgaagaaagagagagggccgagaagaaaaaacgggctactaaaactccaatggtgaagttttccgcttttagt

SEQ ID NO: 217 - DNA, 1053 bp, synthetic construct
  source 1..1053: mol_type = other DNA
gccaccatggccgctaccgctgccgaggccgttgcctccggttctggtgagccacgcgaggaggcaggggctctggggcctgcctgggatgaatcccaactgaggtcctattcctttcctacccgaccaatcccaagactgtctcagagcgatccaagagcagaggaactcatagaaaatgaggagcccgtggtgctcacagatacaaacttggtgtatcccgctctcaagtgggatctcgagtatctgcaggagaacatcgggaatggtgacttttctgtctattccgcttcaacccacaagtttctgtattatgatgagaagaaaatggctaacttccagaacttcaagccacggtctaaccgcgaagaaatgaagtttcacgaatttgtcgagaaactccaggatatccaacagagggggggagaagagaggctgtatttgcaacaaaccctgaacgatactgtcggacggaaaattgtcatggatttccttggcttcaattggaactggataaacaagcaacagggtaagcgcggatggggccagctgacctccaatttgctgctgattggaatggaaggaaatgtaactcccgcccactatgatgagcagcaaaacttcttcgcacaaattaaaggctataagcgatgcatattgttcccgcccgaccagttcgagtgcctctacccttaccccgtgcaccatccctgtgaccgccagagtcaggttgactttgataatcccgactacgaaagatttcctaattttcaaaacgtagttggttacgagactgttgtgggtcccggagatgtgctctacatccctatgtactggtggcaccatattgaaagtctgctgaacggaggcatcactatcactgtaaacttctggtacaagggcgcccccacacccaagagaatagagtatcccctgaaggcgcaccagaaggtggccatcatgagaaacatcgagaaaatgctcggtgaggctttgggaaaccctcaggaagtcggccctctgctcaatacaatgatcaagggacgctataat

SEQ ID NO: 218 - DNA, 954 bp, synthetic construct
  source 1..954: mol_type = other DNA
gccaccatggctgaggcggccctggaggcagtgcgcagcgaactgagagaatttccagccgctgctagagaactctgcgttccactggcggttccatatctggataaaccacccacacctctgcacttctaccgcgactgggtgtgtcctaaccggccatgcatcatccgcaatgctttgcaacattggccagcactccagaagtggtcactcccttacttcagggcaactgtcggctccaccgaagtgagcgttgccgtgaccccagatgggtacgccgatgcggtcagaggtgaccgatttatgatgcccgcagaaagaagactccccttgagtttcgtcctcgacgtactggaaggcagagctcaacacccaggagtgctctacgtgcagaagcagtgctccaatctgcccagtgaactgcctcaactgcttcccgacttggaaagtcacgtaccctgggccagcgaggccctggggaagatgccagacgcggttaatttttggctgggcgaggccgccgccgtgactagcctgcacaaagatcactacgaaaatctgtactgcgtagtgagtggtgagaagcacttcctctttcatccaccatctgatagaccattcatcccatatgagctctacacccccgcaacctatcagctgactgaagaaggtacttttaaagtggtagacgaggaagcaatggaaaaggtaccttggattcctctcgatcctctggcccctgacctcgcaagatacccctcctatagtcaagcccaagctctgcggtgcactgttagggccggcgagatgctgtacctgcccgctctgtggttccatcacgtgcagcaaagccaaggatgcatcgctgtgaatttttggtacgatatggaatacgatttgaagtactcttattttcagctgttggattcactgacaaaggcctccgggctcgac

SEQ ID NO: 219 - DNA, 903 bp, synthetic construct
  source 1..903: mol_type = other DNA
gccaccatgcccggccggctgctgcgaggtctttggcaacggtggaggaggtacaagtatagattcgtgccttggatcgccctgaacctgtcacataatcccagaacactgcgctatgtacctgaggagtctaaagataaggtaatctctgatgaggacgtcctgggcacactcctgaaagtgttccaggctctgttcttgaacgactttaataagcagtctgagatattgtcaatgctccctgagagcgttaaaagcaaatatcaggatcttctggccgtggagcaccagggtgtaaagctgctggagaatcggcaccaacagcagtccactttcaaacctgaggagatcctctataaaacactgggattttctgtggcgcaggccacctcctccctgatcagcgccggaaagggcgtgtttgtgactaagggactggtccctaagggggcagtcgtgtctatgtaccctggaacagtctatcagaagtatgagccaattttctttcagagcatcggcaaccccttcattttcaggtgtctggatggggtcctcatcgacggaaatgacaagggcattagtaaagtcgtgtataggtcttgtaacggcagggatcgactgggtcccctgaagatgagtgactcaacatggctgacttcagagattcataacccactcgcagttggtcaatatgtgaataactgctctaatgaccgagccgccaacgtgtgctaccaggagtttgacgtcccggcagttttccccatcgagctgaaacagtacttgcccaatattgcatactcctacgataaacagtccccgctgcggtgtgttgtgctggtcgccctgcgcgacataaaccaaggagaggagctgttctcaaactactatactatcgtttca

SEQ ID NO: 220 - DNA, 2472 bp, synthetic construct
  source 1..2472: mol_type = other DNA
gccaccatggctactccccgcggcaggactaagaagaaggcctccttcgaccacagtcccgattcattgcctcttcgctcctctggcaggcaggctaagaagaaagcaaccgaaaccacagacgaagatgaggacggtggttccgagaagaaataccgcaaatgcgaaaaagccggatgcacggcgacatgtcccgtctgtttcgcaagcgcctctgaaaggtgtgcaaaaaacggatatacttcaaggtggtaccatctgagctgtggcgagcacttttgcaatgagtgcttcgaccattattatagatctcacaaggacggatatgataaatatactacttggaaaaagatttggacctcaaatggaaagaccgagccctctcctaaggccttcatggctgaccagcaactgccatattgggtgcagtgcactaaaccagagtgtaggaaatggagacagcttacaaaagagatccaactgaccccccagatcgctaagacatacaggtgcggcatgaagccaaacaccgccataaagcctgagacaagtgatcactgctctctgccggaagacctgcgagtgctcgaagtcagcaaccattggtggtacagcatgctgattctcccccccctcttgaaggatagcgtcgccgctcccctgctgtctgcatactaccccgactgcgtgggcatgtctccctcctgtacgtcaacaaaccgagccgccgcgaccggaaatgcttccccaggtaaactggaacatagtaaagccgcactgtctgtgcacgtaccaggtatgaatcgatactttcaaccattttatcagccaaatgagtgtgggaaggccctgtgcgttaggcccgatgtcatggaactcgatgaactctacgagttccccgagtactcccgggatcccactatgtatctggctctcagaaatctgatacttgccttgtggtatacaaactgcaaggaggccctgactccccagaagtgtatcccccacatcattgtcagaggcctggtacgcattcggtgtgtgcaagaggttgaacgaatactgtactttatgactagaaaaggactgatcaacacgggagtcctttccgtcggagcagaccagtatctgctgcccaaggactatcataacaagtcagtcataattataggggccgggccggcaggcctggccgctgcccgccagttgcacaatttcggcattaaggtgaccgtgctggaagccaaggatcgaatcggtggaagagtgtgggatgataagagctttaagggggttacggtgggacggggcgcccagatcgttaacggttgcattaacaaccctgtggctcttatgtgtgaacagctgggcatcagcatgcataaatttggcgaaagatgcgatctcattcaagagggagggaggatcaccgaccctacgattgacaaaagaatggacttccatttcaacgcgttgctcgacgtagtgtcagaatggcggaaggacaaaacacagctgcaggatgttcctcttggcgagaaaattgaagagatttataaagcattcatcaaagaatccggcattcagttctccgagctcgagggccaggtgttgcagttccacctctctaacctggagtacgcctgcggcagtaatctgcaccaggtgtctgctcgatcttgggaccacaatgagttttttgctcagttcgccggggaccacacacttctgacccccggatacagcgtgatcattgagaagcttgctgagggtttggatatacagctgaagagccctgtgcagtgcatcgattactccggtgatgaggtgcaagtgacgaccacagatggcacaggctacagcgctcaaaaggtgttggtaaccgttcccctggcgctgctgcaaaaaggtgctattcaattcaacccccctctgtcagaaaagaagatgaaggctatcaactccctgggggcagggatcattgagaaaatcgcccttcagtttccctaccggttctgggatagtaaggtgcagggcgcggacttcttcgggcacgtaccaccaagcgctagtaagcgggggctctttgctgtgttttacgatatggatccacagaaaaagcatagtgtccttatgagcgtcattgccggcgaagcagtggcctcagtgcggacattggatgacaaacaggtactgcaacagtgtatggccactctcagggaactcttcaaggagcaggaagtgcctgatcccaccaaatactttgtgaccaggtggagtaccgatccttggattcagatggcatattcctttgtgaaaaccggagggagtggtgaggcctatgatataattgcagaagatatacagggcacagttttttttgcaggcgaagcaaccaatcggcatttcccacaaactgttactggtgcttatctgtctggagtgcgagaggcctccaaaattgccgcgttc

SEQ ID NO: 221 - DNA, 2541 bp, synthetic construct
  source 1..2541: mol_type = other DNA
gccaccatgtccaactcaagaccaaggtcccggagagatgccggtggaggcgcaggcgctgctggtagggacgaactggtctctaggagtcttcagagcgcagaacattgcttgggagtgcaggactttggcaccgcctacgctcactacctgctggtactctcattggcaccagagttgaagcatgatgttaaggaaacattccagtacaccctgttcaggtgggcggaggagctggatgcattgagcaggattcaagacctgcttggatgttatgagcaggctctcgaactctttccagacgatgaggttatttgcaacagcatgggcgagcatctgttccggatgggctttagagacgaggctgccgggtacttccataaggcggtgaaactcaatccggacttcagcgatgctaaagagaacttctatagagtggcaaactggctggtcgagaggtggcatttcattatgctgaatgacacgaaaagaaacaccatctacaatgctgcaatacagaaagcagtttgccttggctccaaaagtgttctggatattggggctggaactgggatcttgtctatgtttgcgaagaaagctggtgcacactccgtgtacgcatgcgagctgagtaagacaatgtacgaacttgcatgtgatgtcgtagccgcaaacaagatggaagccggcatcaagctgcttcacaccaagtccctcgacattgagatcccaaaacacatccctgagagggtctccttggtggtaaccgaaaccgttgacgcaggactgtttggggaggggatagtggagagcctcatccatgcttgggaacatcttttgctgcagccaaagacaaaaggagaatctgccaactgcgaaaaatacgggaaagttatccccgcctctgccgttatcttcggcatggctgtggagtgcgctgagatcagaaggcaccacagagtgggaattaaggacatcgccggcatacacctgccaacaaatgttaagttccagagccccgcctactcttccgtggataccgaagagacaatcgagccatacacaaccgaaaagatgagcagagtgcccggcggttatttggcacttactgaatgctttgagatcatgacagtcgactttaacaacctgcaggaattgaagtccctcgccacaaagaagccagataagattggtatccctgttatcaaagaggggatcctggacgctataatggtttggtttgtactgcagctggatgatgagcatagcctcagtacttcacccagtgaagagacctgttgggaacaggcggtctatccggttcaggacctggcggattactggattaaacccggagatcatgtgatgatggaagtgtcctgtcaggactgctatttgcggatccagtcaatcagtgtcttggggctggagtgtgagatggacgttgctaagtctttcacacagaacaaggacctcctcagtttgggaaacgaggcagagctgtgcagtgcgctggctaacctgcagacttctaagcccgacgcagtggaacaaacttgtattcttgagtccaccgagattgcgctcctgaataacattccatatcatgaaggcttcaagatggctatgagtaaagtcttgagcagcctcacacctgagaaactttaccagacaatggatacacactgtcagaatgagatgtcctcaggtaccgggcaatcaaacaccgttcagaatattctcgaacctttctacgttttggatgtctctgagggttttagcgtgctgcctgtcattgctgggactctgggacaagtgaagccctacagctccgtggaaaaagaccagcataggatcgcactggaccttattagtgaggctaaccacttcccaaaggagacactcgagttctggctgaggcacgtggaggacgaatccgcaatgctccagaggcctaaatccgataaactttggagtatcatcattttggatgtgattgaaccctctggcctgatccagcaggagattatggaaaaagcagccatctctcggtgtctcctgcagtctgggggcaagattttccctcaatatgttctcatgttcgggctcctcgttgagtctcagacgctgctggaggaaaatgctgtccagggcaccgaacggacactgggcctcaacatagcacccttcatcaatcaatttcaagtgcctatccgggtgttcctcgacttgagctcattgccatgtattcctctgtcaaagcctgtcgagctgttgcggttggacctcatgaccccctacttgaatacctcaaacagggaagttaaagtatatgtgtgtaagagcggccggctgacagccataccattttggtatcacatgtacctggatgaagaaattcgcctggatactagttctgaagcatcacactggaaacaggccgcagtggttctggataacccaatacaggtagagatgggagaagagctcgtcctctccatccagcaccataaatctaatgtcagtatcacggtaaagcag

SEQ ID NO: 222 - DNA, 2013 bp, synthetic construct
  source 1..2013: mol_type = other DNA
gccaccatgggaactgctctggtgtatcatgaggacatgaccgcgactaggctgctttgggatgatccagagtgcgaaatcgagaggcctgagcggctgaccgctgccctggatagactgaggcaacgggggctggagcagaggtgtttgcgcctgtctgctagggaggcatcagaggaggagttgggtctggttcattcaccagaatacgtctcactggtccgcgaaacacaagtattgggaaaagaggaactgcaggcactgagcgggcagttcgacgctatatatttccaccccagtaccttccattgcgctaggcttgccgcgggggcgggactccagctggtggacgctgtcctcactggcgccgtgcagaacggcctggctcttgtccggcccccgggacatcatggccaaagggctgccgcaaacgggttttgcgttttcaataatgtcgcgatagcagccgcacatgccaagcagaagcatgggctgcaccgaatccttgttgtggattgggacgtccaccacggtcaaggcatacagtatctgttcgaggatgacccttctgtgctctattttagctggcacagatacgagcatggccggttttggccgtttctccgagagagtgatgcagacgctgtaggaagggggcagggcctcgggtttaccgtaaatctcccttggaatcaggtggggatgggcaatgccgactacgtcgcggcatttctgcacctgctgctgcctttggcgtttgagttcgatcctgaacttgtgctggtcagcgctgggtttgactccgctattggggatcccgaaggccagatgcaggcaaccccagagtgcttcgcgcacctgactcaactcctccaagtgctcgccggcggaagggtttgtgctgtgcttgaaggagggtatcacctggaatcactggctgaatcagtctgcatgactgtgcagactttgctgggcgacccggccccgccgctctctggacctatggcaccttgtcagagcgccctggagtctatccagtccgcaagggctgcacaagctccccactggaaatcacttcagcagcaggacgttaccgctgtgcccatgagtccatcaagccactctccagaggggaggccaccaccactgcttccaggagggcctgtttgtaaggcagccgcttctgcgccctcttcactcctcgaccaaccttgcctctgtcccgcgcccagcgtgcgaacagcggttgccctgacaacccccgatatcactttggtgctgccaccggatgtcattcagcaggaagcaagcgccctgcgagaggagacggaagcttgggcccggccccatgagtctttggcgagggaagaggcacttaccgccctgggcaaactgctgtatcttctggacggaatgctcgatgggcaagttaacagtggcatcgccgctacaccggcgtctgccgccgccgccacactcgatgtagccgtaaggcgcgggcttagccacggagcccagaggttgctctgcgtggcgctgggccagctcgatcgacctccggatctggcacacgacggccggtcactgtggttgaatattaggggcaaggaagcggccgctctttcaatgttccacgtttcaacgccccttccggtgatgaccggtggcttcttgtcttgcatattgggcctggtgctgccattggcttatggattccagcctgacctggtgttggtggccctgggtccaggacacggactccagggccctcatgccgctttgctggcggccatgctgcgcgggctggccggtgggcgggtgctggctctcctggaagagaattccaccccacagctggccgggatcctggcaagagtgcttaacggagaagcaccaccctctctggggccgagcagcgttgctagccctgaggatgtgcaggccctcatgtatctgcgcggccaactggaaccccagtggaaaatgctgcagtgtcatcctcacttggtggct

SEQ ID NO: 223 - DNA, 1203 bp, synthetic construct
  source 1..1203: mol_type = other DNA
gccaccatggctttttggggttggagagccgctgccgccttgcgactgtgggggcgggtcgtcgagagagtagaggcagggggcggtgtgggcccatttcaggcctgcggctgtcggctggtgctcggaggccgggacgatgttagcgcaggcctccggggatctcacggcgcccggggggaacctcttgacccagcaagaccacttcaaagaccaccaagacccgaggtgccccgggccttcagacgccagccgcgggctgccgccccgtcttttttctttagcagcattaagggaggacggagaagtatttcattcagtgtaggggcgagttccgtggttggcagcggcggctcatcagataagggaaaactgtccctccaggacgtggctgaactgatccgcgcccgagcctgccagcgcgttgtagtcatggtgggagctggtatcagtacccccagcggtattcccgattttagatctcccggctctggactgtatagcaacctgcaacagtacgatcttccttatccggaagccatctttgagcttccgtttttttttcacaatccgaagccgttctttactctggcaaaggagctctatccaggaaactacaagcctaacgtcacccattactttctgaggttgcttcatgacaaagggctgctgctgcgattgtatacccagaatatagacggacttgagagggtgtcagggatccctgctagcaaattggtggaggctcacggtaccttcgcatctgccacttgcaccgtttgccaacggccatttcccggtgaagacattcgagccgatgtgatggcagatcgggtcccgagatgccctgtctgcacgggagtggtgaaaccagatatcgtgttctttggggaacctctccctcagaggtttctcctccacgtggttgattttccaatggcagacctgctcctgatactgggaacctctctcgaggtggagcctttcgcctctcttaccgaggctgtgagatcatccgtgccccgacttctgattaacagggacctggtcggaccattggcctggcatcccagatctagagacgtcgcccagcttggggatgttgtgcacggagtggaatcacttgtcgagctcttgggttggaccgaagagatgagggacctcgtgcagagggagactggtaagcttgatggccctgacaag

SEQ ID NO: 224 - DNA, 2976 bp, synthetic construct
  source 1..2976: mol_type = other DNA
gccaccatggctatcaacgtactgattggcagcattcgaattgattccctcggtacactgtcagatctcagcgactgcgagggaaggcttttccccatcggatatcagtgctctcggctctattggagcactgttgatgccaggagaagatgctggtaccggtgccggatactcgagtaccgcccttggggccctcgagaagagccagctcacttggaggccgcagaggagaaccaaactatcgtgcactctccagcacctagctcagaaccccctggcggagaggacccacccttggataccgacgtattggtgccgggtgccccggagagacacagcccaattcagaacctggaccctccgctgagacccgatagcgggtccgccccgccccctgctccccggtccttctctggagccaggattaaggtgcccaattattctccttcaagacgccctctgggtggagtttcattcgggcccctgcctagtcctggaagtccaagctcactcacccatcacatcccaaccgtgggggatccagatttccctgccccaccgcgcaggagcagaaggccctcacctctcgccccacgccctccgccttctaggtgggcttcacctccactcaagacttcaccccagttgcgagtgcctccaccaacttccgtggtcacagcgcttacccccaccagcggcgagctcgcacctcccggtcctgctccgagtcccccaccccccgaagacctgggcccggattttgaggacatggaggtagtgtcaggtttgtcagcagccgatttggatttcgccgcatctctcctgggcaccgagccatttcaagaagaaatcgtagctgcaggcgccatgggctccagtcacggcggtcctggtgatagtagcgaagaggaaagctctcctacatcccgctatatccatttcccagtcactgttgtgtccgcacctggcctcgcccccagcgccacaccaggtgcgccacgcatcgagcaattggacggtgtcgatgatggaaccgattctgaagccgaagctgttcagcagccccggggtcaggggacccctccaagtgggcctggagtcgtcagggcgggcgttctgggggccgctggcgatagggccagaccacccgaggacctgccctccgagattgttgacttcgtgctcaaaaatctcggcggtcccggggatgggggagccggccctcgcgaggagagtctgcctcctgccccaccgctggctaacggtagccagccttcacagggactgacagctagccctgccgatcccacacggacgttcgcttggttgccaggcgctcctggggtccgcgttttgtctctggggccagccccagaaccgccaaagcccgccacctcaaagattattctggtcaataaactggggcaagtctttgtgaaaatggcaggcgagggcgaaccggttccccctcccgtgaaacaacctccacttccacctacgatttccccaaccgcaccgacaagctggactcttccaccaggtccccttctcggtgtgctgccggtggttggagtggtaaggcctgcccctccccctccgccaccgcccttgaccctggtgctgtctagcggccctgcttcccctccacgacaggccatccgggtcaagcgagttagtacatttagtggacgcagtcctcctgcaccccctccttataaagcacccagactggacgaggatggggaggcttccgaagacacaccgcaggtgcctgggctgggctctggcggattctctcgcgttagaatgaaaaccccaacggtcagaggagtgctggaccttgatcggcccggagagccagcgggagaggagagccccggccccctgcaggaacggagcccacttctcccattgcctgaggacggtccacctcaggtacctgatggtccccctgatctcctcctggaatcccagtggcaccattattctggggaggcctcaagctctgaggaagagcctccctcacctgacgataaagagaaccaggccccaaagagaacaggcccccatctgaggtttgagatcagcagcgaggacggtttctcagttgaagcagaaagcttggagggggcttggcggacgcttattgagaaggttcaagaggcacgaggccatgcgcgattgaggcatctttcattctctggaatgtcaggagccaggcttctgggcatacaccacgacgcggttatcttcttggccgaacagttgccaggcgctcagcgatgccagcactacaagtttcgctatcaccagcaaggcgaaggccaggaagaacctcctctcaacccccatggagccgcacgcgccgaagtttacctgcgcaagtgcaccttcgatatgttcaactttctcgccagccagcaccgcgtgcttcctgaaggagctacctgcgatgaggaggaggatgaggtacagctgagaagcactagaagggcgactagcctcgaactgcctatggcaatgcgcttccggcatctcaaaaagacatctaaggaagcggttggtgtctatcgctcagcaattcatggaagaggcctcttttgtaagaggaacattgacgccggagagatggtgatcgagtactctgggatcgtgataagatccgtactgacggacaaacgggagaagttttatgatgggaaaggcattggctgttatatgttcagaatggacgattttgatgtggtggacgccacaatgcacgggaatgccgccaggtttataaatcattcctgtgaaccaaactgctttagccgcgtgatccacgtggaaggacagaaacacattgtgattttcgccctgcggagaattctccgaggggaggagctgacctacgactacaagtttcctattgaagacgcctccaacaaactgccttgcaattgcggggctaaaagatgcagacggtttctgaac

SEQ ID NO: 225 - DNA, 1137 bp, synthetic construct
  source 1..1137: mol_type = other DNA
gccaccatggaggaacctgaggaacccgccgattcaggtcagagcctcgtgcccgtatatatatacagtcctgagtatgtctctatgtgtgactccctggctaagattcctaaacgggccagcatggtccactccctcatagaggcttatgctctccacaagcagatgaggattgtgaaacccaaggtcgcctccatggaagagatggccacctttcatactgatgcttatctgcagcacctgcaaaaagtatcacaggagggggatgatgatcatccagatagtatagaatatggcttggggtacgactgcccagccaccgaaggcatcttcgattatgcagcagcgataggcggggcaaccatcactgctgcacagtgcctgatcgatggcatgtgtaaggttgcgataaactggagcggaggctggcatcatgctaaaaaggacgaagcctccggcttctgttatctgaatgatgccgttctgggcatcctgagattgcgcaggaagttcgagcggatcttgtacgtggacctggacctgcaccatggggacggcgtggaagatgcgttttccttcacgtctaaggtgatgacagtgtccctccacaaattctctccaggatttttccccgggaccggagatgtgagtgacgtgggactgggtaagggacggtactattctgtcaacgtcccgatacaagacgggatccaagatgaaaagtactatcagatctgcgagtcagtcttgaaagaagtataccaggccttcaatcctaaggcggtagtgctccagctgggggcagacactattgctggcgatccaatgtgttcatttaatatgactcctgtcggaattgggaagtgtttgaagtacatccttcagtggcagctggctactcttattctcggaggcggagggtacaacctggccaatacagcacggtgttggacatatttgactggtgtaatactgggtaagaccctgtcatccgagattccagaccacgagtttttcactgcatacggcccggattatgtgttggagatcaccccatcatgtcggcctgacagaaatgaacctcatagaattcaacaaatcctcaactatatcaaaggtaacctgaagcacgtcgtg

SEQ ID NO: 226 - DNA, 1470 bp, synthetic construct
  source 1..1470: mol_type = other DNA
gccaccatggcagccggcagtgaggctacaactccagttatcgtcgcagccggcgctgggggggaagaaggggaacacgtgaagccttttaagccggagaaggcgaaggaaatcataatgtctctgcaacagcccgccattttttgcaacatggtcttcgactggccagcgcggcattggaatgccaaatacctcagtcaggtgctgcacggaaagcagattcggtttaggatgggtatgaaaagtatgtctacagtcccccagttcgaaaccacatgcaattacgtggaggcaactctggaggaatttctgacttggaattgcgatcagtcttcaatctcagggccgttccgcgactacgaccactctaaattttgggcatacgctgactacaagtacttcgtgtccctgttcgaggacaagactgatctgtttcaggacgtaaaatggtccgacttcgggtttccagggcggaacggccaagagtcaaccctgtggattgggtcacttggtgcccacactccctgtcacttggatagctacggatgcaacctggttttccaggtccagggcagaaagcgctggcacctgttccctccagaggataccccttttctgtatcctaccaggatcccctatgaggaaagttctgtattttctaagattaacgtcgtgaaccctgacctgaaacgcttccctcaatttaggaaggcccagaggcatgccgtaaccttgtccccgggacaggtactcttcgttcctaggcattggtggcattacgtggagagcattgacccggtaaccgtgtccattaatagctggattgagctggaggaagaccacttggccagagtggaagaggccataactcggatgctcgtgtgtgctcttaagacagccgaaaacccacagaatactagagcctggctgaatcctactgaggtagaggagaccagtcacgccgtgaattgttgctacttgaacgccgcagtaagcgcattttttgacaggtgtagaacaagcgaggtcgtcgaaatacaggcactgcgcaccgacggggaacatatgaagaaggaggagctgaacgtctgcaaccatatggaggtgggtcagacaggtagccagaacctgacgaccggcaccgacaaaccagaagcagccagcccattcggtcccgatctcgttcctgtggcacagcggagcgaagaaccaccttcagaaaggggcggcatattcggctctgacggcaaagattttgtcgataaagacggtgaacacttcgggaagctccactgtgctaagagacagcagatcatgtcaaattccgagaacgccattgaggagcaaatcgctagcaacactacaacgacccctcagaccttcatttctacggatgatctgttggactgcctcgtgaatccacaagtgacccgaatcgtggcccaactcctgattcagggcaggtctctg

SEQ ID NO: 227 - DNA, 1515 bp, synthetic construct
  source 1..1515: mol_type = other DNA
gccaccatgagctcccagtcacatcctgatggtctctccggtagggaccagccagtggagctcctgaatcccgctagagtcaatcatatgccgtctacagtagatgttgcaactgctttgccgctccaggttgccccttcagccgttcctatggacctgcgactggaccaccagtttagtctgcccgtagccgagcctgctctccgggagcagcagcttcagcaggaactcctggccctgaagcagaaacaacagattcagaggcaaatcctgatcgccgaatttcagcgccaacacgaacagctgtctcgccagcacgaggctcagcttcacgaacatataaaacaacagcaggaaatgcttgctatgaaacatcaacaggaattgctggaacaccagaggaagttggagagacaccgccaggagcaggagctggagaagcagcatagggagcagaagttgcagcagctcaaaaataaggaaaagggaaaggagtctgctgtcgcaagcaccgaagtcaaaatgaaacttcaagagtttgtcctgaataagaagaaagctctggcccatcggaaccttaatcactgtatctcatcagatccgcgctactggtacggaaagactcagcatagcagtctggatcagtcctcccccccacagagcggtgtgtcaactagctataaccaccctgtcctgggaatgtacgacgcaaaagacgacttccctctgagaaaaactgccagcgagccgaacttgaaactgcgcagtaggttgaaacagaaggtcgctgagcgcaggagcagccccctgctgaggagaaaggacggaccagtagtaaccgcacttaaaaagcggcccctcgacgttaccgattccgcctgctcctccgcacccggatccggaccgtcttctcccaacaatagttccggatccgtttccgcagagaacggcatcgcccccgcggtgccctccattcccgcagagacaagcctcgcccatagacttgtggccagggagggatccgctgctccgttgcctctgtatacaagcccaagtctgcctaacataacactcgggctcccggcgacaggcccaagcgccgggactgccgggcagcaagacgcagagagactgacacttcccgctctccagcaaagactgtcccttttccctggcacacatcttacaccttacttgtccaccagtcccctggagcgcgatgggggagccgcgcactcacccctgctgcagcacatggtgctgctggagcaaccccccgcgcaggcaccactggtgactgggctcggcgctttgccactgcacgcccaaagcttggtcggcgccgatcgggtttccccttctatccataagcttcgacagcacagacctctgggtaggacacagtccgctcccctccctcagaacgcccaggctctccaacacctcgtgattcaacaacagcaccaacagttcttggaaaagcataagcaacaatttcagcaacagcagctccag

SEQ ID NO: 228 - DNA, 1749 bp, synthetic construct
  source 1..1749: mol_type = other DNA
gccaccatgaataaaataattcctaaacctagcgaaccggcgagacagccagaaagtcatccggaggaaacagaggaagagctgcgcgaacatcaagctctgctggatgaaccttacctggatagactgcccggacaaaaggaagctcatgcccaggccggggtccaggtcaaacaggagcccatagagtcagatgaggaagaggccgagccaccaagagaggtcgagccaggacagagacagcccagcgagcaggaacttctcttcagacagcaagctctcctcttggagcagcagagaatccaccagcttagaaattaccaggcgtcaatggaagccgcgggaatccccgtctccttcggtggccaccgccccttgtctcgggcccaaagtagtcccgccagtgccacgtttccagtgagtgtgcaggaaccccccaccaagcctagattcacaacaggactcgtctatgacactctgatgctcaaacaccaatgtacgtgtggttcttcctcaagccaccccgaacatgctgggcgaatccagtctatatggagcagactccaagaaaccggacttcgcggcaagtgcgagtgcataaggggccgcaaggccaccctggaggaactgcagaccgtccattccgaggcgcatactctcctgtatggcacaaaccccttgaatagacaaaaactggattccaaaaaactgctgggctcactcgccagtgtgtttgttagactgccctgtggcggggtaggcgtcgactcagatactatttggaatgaagtgcacagcgctggtgcggccagacttgcagtcggatgtgtggtagagctggtgtttaaagttgccaccggagagctcaaaaatggctttgcagttgttcggccccccggccaccacgccgaagagtccacccctatggggttttgctatttcaattctgtggccgttgctgctaagctccttcagcagcggttgtccgttagcaagatcctcatagtcgactgggacgtccaccatgggaacggcacgcagcaggccttctattccgaccccagtgttctgtatatgtctctccaccgctatgacgatggtaattttttccctggttctggtgctcctgatgaagtggggacaggacccggggtaggcttcaacgttaatatggcgtttacaggcggcctcgatccaccaatgggcgacgctgagtaccttgcagcctttcgaacagtggtgatgcccatcgccagcgaatttgccccggacgtcgtgctggtgtcttccgggttcgatgcagtggaaggccacccaaccccgctcggggggtataacttgtctgcaagatgtttcggttacctgaccaaacagcttatgggtcttgccggtggcaggatcgttctcgctctggagggcggccacgatctgaccgccatctgtgatgcatccgaggcctgcgtgtctgccctcttgggcaatgagctggacccccttccggagaaagttctgcagcagcggccaaatgccaacgctgtgaggtccatggaaaaggtgatggagatccactctaaatattggaggtgcctccagagaaccacctccactgccggccggtcccttattgaggcacagacatgcgaaaatgaggaagcggagaccgtgacagctatggcctcactgtccgtgggcgtcaaacctgctgagaagcggccagatgaagagcccatggaagaggaacctcccctg

SEQ ID NO: 229 - DNA, 561 bp, synthetic construct
  source 1..561: mol_type = other DNA
gccaccatggccacggccatgtatttggagcactacctggattcaatcgaaaacctgccatgtgagcttcagcgcaacttccagcttatgagagagttggaccagcgcacagaggacaagaaagctgagattgacatcttggcagctgagtacatcagtactgttaaaaccctgtcaccggatcagagagtcgagcgattgcagaagattcagaatgcttatagcaagtgtaaagaatacagcgacgataaagtgcagctggcgatgcagacatacgaaatggttgataagcacatacggaggcttgacgcggatttggcacggttcgaagctgacctgaaagacaaaatggaggggagcgactttgaaagtagtggggggaggggtctgaaaaagggaaggggtcaaaaggagaagagaggctcaagggggcgcggtcgcaggaccagcgaggaggacacacctaagaagaaaaaacacaagggaggttcagaattcacagacacgattctcagcgtacatccctccgatgtgctggatatgcccgtggaccccaacgaa

SEQ ID NO: 230 - DNA, 399 bp, synthetic construct
  source 1..399: mol_type = other DNA
gccaccatggccgacgttgtggtgggcaaggacaagggaggagagcagaggctcatttccctgcccctcagtcggatcagagtgataatgaagtcatccccagaggtgtcctctatcaatcaagaagcactggtgctcacggccaaggccacagagctgttcgtccagtgcctcgccacatattcttatcggcacggcagtggaaaggagaaaaaggtacttacctattccgacttggccaataccgcccagcagagcgaaacatttcaatttctcgcagatatcttgcctaaaaaaatcctcgccagcaaatacctgaagatgttgaaggaagaaaaacgggaggaggatgaggagaacgacaacgataacgaaagtgaccacgatgaggcagattct

SEQ ID NO: 231 - DNA, 1074 bp, synthetic construct
  source 1..1074: mol_type = other DNA
gccaccatgagcaaactgtggcgcagggggagtacctcaggtgccatggaggctcctgaaccaggtgaagctctggaattgagtcttgcaggcgcccatggccacggggtgcacaagaagaagcacaagaagcataaaaagaaacataaaaagaaacaccaccaggaggaagacgccgggcctacccagccttctccagcaaagcctcagcttaagctgaagatcaaacttggaggacaggttcttggcaccaaatctgttccaaccttcaccgtgatacctgaagggccacggtctccttcccccttgatggtggttgataatgaagaggaaccaatggagggagtgcccctcgaacagtaccgggcctggctcgatgaagactctaacctgtccccatcacctctgagggatctgagcgggggattgggggggcaagaggaggaagaagaacaacgctggctcgatgccctggagaagggtgagcttgacgataatggcgacctgaagaaagaaattaacgagagacttctgaccgctagacagcgggccctcctgcaaaaggccagaagccagccttcacccatgttgcctttgcccgtcgctgaagggtgtcctcctcctgccctgaccgaggaaatgctgctcaagcgagaggaacgggccagaaagcggagactgcaagctgcacgcagggctgaggagcacaaaaaccagactatagagagattgactaagacagcagcgacgtccggtagaggagggcgggggggtgctagaggagagagacgcggtggacgcgcggccgcacctgctcccatggtgaggtactgtagcggtgctcaggggtccacgctctcatttccccccggagtgcctgctccaaccgccgtgagccagcgcccctctccatccggccctccccctagatgttccgtgcccggttgcccccacccccggcgctacgcttgttcacggactggtcaagcactgtgcagtttgcagtgttacaggattaatctgcagatgagactgggcgggcctgaaggcccgggtagccccctgctggcgact

SEQ ID NO: 232 - DNA, 1311 bp, synthetic construct
  source 1..1311: mol_type = other DNA
gccaccatggaggaggacgacgagacagaagacgtgaagacagccaccaacaacgcttcaagctcctgccagtccacaccccggaagggcaaaactcataagcacgtacacaatggccatgtgttcaacggcagttctcggtccacacgcgaaaaagaacctgtgcagaagcataagagtaaagaggcaacccctgccaaggaaaaacattcagatcatagagcagactcaagaagagagcaggctagcgccaaccatcctgcagccgccccgtccacaggaagcagtgcaaagggcctggccgcaacgcaccaccatcccccactgcaccgctccgcacaagaccttagaaaacaggtctctaaggtcaacggcgtgactcgcatgtcctcccttggcgctggcgttacctctgcaaaaaagatgagggaagtgagaccctccccgagcaagaccgttaaatacaccgctactgtcacgaagggggccgttacatacaccaaggccaagagggagctggttaaagacaccaagccaaaccatcataagccttcatcagccgtcaatcacactatatctggcaagacagagtctagtaacgccaagactcgaaagcaggttttgtcattggggggcgcttccaaatcaacggggccagccgtgaatggactcaaggttagcggtcggctgaaccccaaatcatgcactaaggaggtgggaggcagacagctcagggaaggtctccagcttcgggaaggtctgcgaaatagcaagaggagactcgaagaggcccatcaggctgagaaacctcagtcccccccaaaaaaaatgaaaggtgccgccgggcctgccgagggacccggcaaaaaggctccagccgaacgcgggctgctgaacgggcacgtgaagaaggaggttccggaaagatcactcgagagaaacagaccaaaaagggcgaccgccggtaagtcaacccccggtcggcaagcgcatggcaaggcagatagtgcgtcctgtgagaatcggtccacctcacagcccgaatctgtacacaagcctcaggacagcggcaaggccgagaaaggtgggggcaaggcgggctgggctgccatggacgaaattcccgttctccggccctctgcaaaagagtttcacgaccccctgatttacatagagtcagttagggcgcaggtggagaaatttggtatgtgccgggtcatcccccctccagattggagaccagaatgcaagctcaatgacgaaatgcggttcgtcactcagatccagcacatacataaattggggaggaga

SEQ ID NO: 233 - DNA, 1608 bp, synthetic construct
  source 1..1608: mol_type = other DNA
gccaccatggaggagcaccggcggctcgagaaggaggtccttatggagaaagaaattcttgagaagcggaagggccccctggaaggccacaccgagaatgatcaccacaagttccatcctctgccaagatttgaacccaagaacggattgatacatggcgttgccccgcgcaacgggtttcggtcaaaattgaaagaggtcgggcaagctcagctgaagactggccggcggcgcctgtttgctcaggaaaaagaggtggtgaaggaggaagaggaagacaaaggcgttcttaacgacttccataagtgtatctacaaggggcgctctgtgagtctgaccactttttataggactgcaagaaacataatgagtatgtgcttctccaaggagccagctccggcggagattgagcaggaatactggagactggttgaagagaaggattgtcatgtggccgtgcattgcgggaaggtggatacaaacacccatggaagtggctttcccgttgggaagtctgagcccttttctcgacatggctggaaccttactgtgctgccaaacaacaccggaagcatacttaggcacttgggggccgtgccgggagtcactataccttggctcaacattggtatggtgttttctacctcatgctggtccagggaccagaaccacctgccatacatcgactaccttcataccggcgccgactgcatctggtactgtatcccagctgaagaggagaacaagctcgaagacgtggttcacactctgctgcaggccaacggcacccccggtctgcagatgcttgagtcaaacgtgatgatttctcccgaagtcttgtgcaaggaagggattaaggtccacagaacagtccagcagagcggacagttcgtggtttgctttcctgggtctttcgtcagcaaggtttgttgtggatatagcgtgagcgagactgtgcactttgctacaactcagtggacttctatgggctttgaaaccgccaaagagatgaagcgcagacacatcgccaaacccttttcaatggaaaaactgctgtaccaaatcgcccaggcggaagcaaagaaggaaaacggacccacactctccaccatctccgctctcttggacgagctgagggacactgagctgcgacagcggcggcaactgtttgaagccggtctgcacagcagtgcacgctatgggagccatgacgggtcttcaactgtggctgatggaaaaaaaaagccgaggaaatggcttcagctggaaacttctgaaaggcggtgtcaaatctgccagcacctgtgctacctcagcatggttgtgcaggagaacgaaaacgtcgtgttttgtctggagtgcgccttgcgccatgtggagaagcagaagtcttgccgcggtctcaagctcatgtaccgctatgatgaggagcagattatatctctggttaatcagatttgcggtaaagtcagcggcaaaaacgggagcattgaaaattgtctgtccaagccgacccctaaacgaggtcctcggaaacgagctactgttgacgtccctcctagcagactgtcagccagtagttcctcaaagtccgcgagctcttcttcc

SEQ ID NO: 234 - DNA, 1305 bp, synthetic construct
  source 1..1305: mol_type = other DNA
gccaccatgcgcgccgaagggctcgggggtctggagaggttttgcagccccggcaaaggtcgcggactgcgcgctcttcagcccttccaagtgggtgacctgcttttttcctgtcccgcatacgcttatgtgctcaccgtaaatgaaagaggtaatcactgcgagtattgcttcacccgcaaagaggggttgagtaagtgtggcagatgtaagcaagccttttattgtaatgttgaatgtcaaaaagaagactggccaatgcacaagttggaatgctctcccatggtggtcttcggcgaaaactggaatccaagcgaaaccgtaaggcttacagcccggattttggccaagcagaagattcatcccgagaggacgccctcagagaagctgctggcagtgaaagaattcgagtctcacctggacaaattggacaacgagaaaaaagaccttatacaaagcgatatagcagcacttcatcacttttatagcaagcacttgggattcccagacaatgactccttggtagtgttgtttgcacaagtaaattgcaatggctttacaattgaggatgaggaactgtcacatctgggtagcgccatattccctgatgttgcattgatgaaccatagctgttgtccaaacgtcattgtcacctacaaaggcacactggcagaagttagggccgtgcaggaaattaaacccggggaggaggtcttcacgtcttatatcgacctcctctatcccaccgaggatcggaatgatagactgcgagattcatacttctttacatgcgaatgtcaggaatgcacaactaaggacaaggacaaggctaaggtggagattagaaagcttagcgacccacctaaggccgaggccattagagacatggttcgctatgctcgaaatgtgattgaggaatttcgccgagccaaacattataaatcaccatccgagctgttggagatctgtgagctgagccaggagaaaatgagcagcgtatttgaggattcaaacgtgtatatgctccacatgatgtaccaggctatgggagtctgtctgtacatgcaagactgggaaggggcattgcagtacggccagaaaatcatcaagccttacagcaaacattatcccctgtactccttgaatgtggcttccatgtggctcaaactggggcgcctgtacatggggctggagcacaaagccgccggggagaaagccctgaagaaggctatagccattatggaggtggcacacgggaaggaccacccatatattagcgaaatcaagcaggagatcgagagccac

SEQ ID NO: 235 - DNA, 738 bp, synthetic construct
  source 1..738: mol_type = other DNA
gccaccatgaacggccctgccgatggcgaggttgactacaagaagaagtatcgaaatctgaagcggaagctcaagtttttgatctacgagcatgagtgtttccaggaagaacttcgaaaggctcaacgcaaactcttgaaagtgagcagggacaaatcctttcttttggacagactgctccagtacgaaaatgtggacgaagatagctccgattcagacgctactgccagctccgacaattcagaaacagagggcacacctaagttgagcgacacacctgcacctaagagaaagcggtccccacctttgggcggcgccccgtcaccaagctctctctccctgcccccctccactggatttccccttcaagcatctggagtgccgagtccatacctgagctcccttgccagttcccggtaccccccctttcccagcgactatctggcactgcaacttcctgaaccatctccgttgcgcccgaagagggaaaagcgccccagactgccgcggaagttgaaaatggcagtgggaccccccgactgcccggtcggcggtcccctgaccttccccggcaggggaagtggagcaggagtggggacgacgcttacacctctcccacctccaaaaatgcctccaccgaccatccttagcacggtgccacgccagatgttctctgacgcgggatccggagatgacgcactggatggggatgatgacctggtgatcgacattcccgag

SEQ ID NO: 236 - DNA, 2874 bp, synthetic construct
  source 1..2874: mol_type = other DNA
gccaccatggaagccgggggccttcccctggagctttggagaatgatcctggcttatctccatttgcccgatctcggcaggtgttcacttgtgtgccgcgcttggtatgaacttattttgagcctggacagtactcggtggaggcagctctgcttgggctgtacagaatgcaggcaccccaactggccaaatcaacccgacgtggaacctgaatcctggcgggaagccttcaagcaacattacctggcatctaagacctggactaagaacgcgctggatctcgagagtagcatatgcttcagtctcttcaggagacgccgagagcggaggaccctgtccgtagggccagggagagagttcgatagtctggggagtgccctcgcaatggcctccctctatgatcggatcgtgctgttcccaggcgtgtacgaagagcagggcgaaatcattctgaaagtcccggtggagatcgtcggccagggaaaattgggtgaggtcgccctgctcgcgagcattgaccagcactgctctactacgagactgtgtaacctggtgtttacccccgcctggttctctcccatcatgtacaaaactaccagcggccatgttcaatttgataactgtaacttcgagaacgggcacattcaggtccacggccctggaacgtgtcaggttaaattttgcaccttcaaaaacacccacatcttcctgcataatgtccctctgtgcgtgctggaaaactgtgagtttgttggcagcgagaacaactcagttactgtcgagggccacccaagtgcagacaagaattgggcctataagtatctcctgggcctgatcaaaagctctccgaccttcctgcctacagaagattccgacttcctgatgagccttgacctcgagtcacgggaccaggcttggtcaccaaagacctgtgatatcgttatagaaggaagccagtcacccacgtcacctgcgagcagctcaccaaaacctggatcaaaggcgggctctcaagaggccgaagtcggctctgacggtgagagggtggcccaaacacctgatagtagtgacggcgggctcagccccagcggagaggatgaagacgaggaccagctcatgtaccggctttcttatcaggtgcagggcccccgccctgtgttggggggatcctttttgggcccgcccttgcccggagcttccatccagctgccctcttgcctggttttgaactcactgcagcaggagctgcagaaagacaaggaagctatggccctggcaaatagtgttcagggttgcctgatcagaaaatgcctctttcgcgatggtaagggaggagtcttcgtatgtagtcacggccgggctaaaatggagggtaacatattccgaaatctgacctatgcagtgcgctgtattcacaattccaaaataatcatgttgaggaatgacatttatagatgccgcgctagtggaatttttctgcgactcgaggggggcgggctgatcgctgggaacaacatttaccacaatgccgaggcgggggtcgacatccggaaaaagtcaaatccgcttatcctgtgcaaccagattcaccatggactgagatctggcattgtagtgctgggcaatggtaaagggattatcagaaacaaccaaatattctccaataaggaagccgggatctacattctgtatcatggcaaccccgtggtgagcggaaaccacatatttaaggggagagccgctggaattgctgtgaacgaaaatggcaagggactgattacggaaaacgtgattagggaaaatcagtggggaggagtcgatatcaggaggggaggcatccccgtcctcaggagcaatctgatttgcttcggatatagcgatggggttgtggtcggcgatgagggcaaaggattgattgagggaaatacaatctacgcaaataagggttgcggtgtgtggatgatgtcttccagtctcccccatgtgacttctaaccacgtgtcctataatggtttgtatggcgtcgccgttttctctcagaaggacggcagttcagagctgcctcggggccaccgcgctcaggaaaatttttccgaggacggcgacgcaatactgtgggagaccgaactggaaaaagaagacgatcccctgcgccgccccataacaatcgccctcgttgaaagcaactctattaatcacaacggagcgtcaggcctgtacgtgcaatcctcagaggccttgcatgtgatcacaaatgtcatacacgcaaatggagatagagggatcaccgtggcccagtcaagccagcccacccgcgtggctaacaactctatctcatgcaatcgccagagcggagtgaaagtggaggcccagtgcaaggtggaacttagaggcaacgggatatatgacaacaggggccatgggattatcaccaagggggactctactatcgtgattgaaaatgacataataggaaaccgcggttctgggctgcagctcctgcccaggagcgacactaaggtgattaagaaccggatccattccttccgcgcttatggaatcgcggtgaggggcagagccaaagcattggtgcaggaaaacatcatctttcagggcaagacatccaagactatcttccagcagataagtaacaatcgcgaatgtatcatgcagaataacaagttcttggtattcaaaaaaaagagcgacacttggagactggtcaaccctccagcccggccacacctggagaatagcctcaggaggccttctgcagcccataatggccaaaaggtgacagccatggctacccggattacagctagggtcgagggaggatatcattccaatcgatcagtgttttgtaccattctt

SEQ ID NO: 237 - DNA, 2049 bp, synthetic construct
  source 1..2049: mol_type = other DNA
gccaccatgcctctgaatccaagttgtaaaatcatgacctttaggccctctatggaggaattccgagaattcaataaatacctggcctacatggaatctaagggtgcacatagagctgggttggccaaggtaatacctccaaaagagtggaagccaaggcagtgctatgatgacatcgataacttgcttattcccgctcctatacagcagatggtcacggggcaatccggactctttactcagtacaacatccagaagaaggctatgactgtgaaggaatttcgccagctcgcaaatagcggcaagtactgtactccgcggtatctggattacgaggacctggagcggaagtactggaaaaacttgacctttgtagcccctatttacggtgctgacattaatggcagcatctacgacgagggcgtggacgaatggaatattgcaaggctgaataccgtgcttgacgttgtagaggaagagtgtggtatatcaatcgagggcgtcaacacaccctacctgtatttcgggatgtggaaaaccaccttcgcgtggcatactgaggacatggacctttactctattaattacctgcacttcggcgaaccaaagtcttggtatgccattcctccagaacatggcaagcgactggaacggttggcgcaggggttttttccctcctcatctcagggctgtgatgcgttcctgagacataagatgacgctgatttcaccctcagtcctgaagaaatatggaattccttttgacaaaataacacaggaagccggtgagttcatgataacctttccctatggctatcatgcaggattcaaccacgggtttaattgtgcagagagtacaaactttgcaaccgtgcgctggattgactacggcaaggtcgctaagctttgcacctgccgcaaggacatggtcaaaatttccatggacatctttgttcgcaaattccaacccgaccgctaccaactctggaaacaggggaaggatatttataccatcgatcacaccaaacctacccctgccagcacgccggaagtgaaggcgtggctgcaacggcgcaggaaggtccggaaggcatctcgctcattccagtgtgcacgctccacaagcaagcggccgaaggccgacgaggaggaagaagtatcagatgaagtggacggagctgaggtgcccaatcctgacagcgtcacagatgatctgaaggtaagtgaaaaatctgaggcggcggttaaattgagaaatacggaggcctcctctgaggaggaatcctcagcctctcgcatgcaggttgagcagaacctgagcgaccatataaagttgagtggtaattcttgcctgtctacaagtgtgactgaggatatcaagacagaagatgacaaagcctacgcgtaccggagcgtaccatcaattagcagcgaggccgatgactccattcccctgtcttcaggctacgagaagccagagaagtccgatcccagcgaactctcttggccaaagtctcccgaaagttgctcaagtgttgctgagagtaatggtgtgttgactgaaggcgaagagtccgacgtggagtctcatggcaatggattggagcccggcgaaatccctgcagtgccctcaggggagaggaatagcttcaaggttccatccatcgccgagggagagaacaagacatcaaaatcttggagacacccactcagccgacccccagccaggtctccgatgacattggtgaagcagcaggctccatccgatgaggaactgcctgaggtattgtctatcgaggaggaagtagaggagactgagtcatgggctaagcctctgatccacttgtggcaaactaaatccccaaattttgctgcagagcaggaatataatgcaactgtcgccagaatgaaaccccactgcgctatctgtactctgcttatgccttatcacaaacccgactcaagcaacgaagagaacgatgcaaggtgggagaccaaacttgatgaggtggtgacctctgagggcaaaactaaacctctgatcccagag

SEQ ID NO: 238 - DNA, 2007 bp, synthetic construct
  source 1..2007: mol_type = other DNA
gccaccatgatcgaaagtgatagcgagtcagacggggagctccaagaccggaagaaggtccgggtggaggttgaacagggagagacttctgtgccccccggttctgcgcttgttggaccatcctgcgtcatggacgactttcgggacccgcagagatggaaggaatgtgctaaacaaggtaagatgccgtgttactttgatctcatcgaggagaacgtttacctgaccgaaaggaaaaagaataaaagtcaccgagatataaaaaggatgcaatgcgaatgtaccccactttccaaagacgagcgagctcagggcgagatcgcctgcggagaagactgtctgaacagactcctcatgatcgaatgctctagccgatgcccaaacggagattattgctcaaaccgcagattccaacggaaacagcacgccgacgtggaggtcatcctgactgagaaaaaaggttggggactgcgagccgccaaagatcttccttctaatacgttcgtcctggaatactgtggcgaggtgctcgatcacaaggaatttaaggcgcgcgtgaaggagtatgcaaggaataaaaacattcactactatttcatggccctgaagaatgatgagatcatagatgcaacccagaagggaaactgctccagattcatgaaccacagctgtgagcccaactgtgaaacccaaaagtggactgtgaacggacaactgcgcgttgggtttttcacaactaagctggttccaagcggtagcgagttgacgtttgattatcaatttcaacgatatggtaaagaggctcagaaatgtttctgcgggagtgctaattgtagaggatatctggggggcgaaaatcgcgtgagcattcgggctgcaggaggcaaaatgaaaaaagaacggtcaagaaaaaaagactccgtcgatggcgaactggaagcactgatggagaatggggaaggactgtccgacaagaatcaggtactgtctctgtctaggctcatggttcggattgaaactctggaacagaagctcacctgcctggagttgatccagaacacccactctcagagctgccttaaatcttttctggagcggcacggtctgagcctgctttggatttggatggctgaactcggcgatgggcgggagtctaaccagaagctgcaggaggaaattatcaaaacccttgagcacttgccaattccaaccaagaacatgctcgaggaaagcaaagtcctgcctatcatccaaaggtggtcacagacaaagacagccgtcccccccctgtcagagggggatggctatagcagcgaaaacactagtcgggcacatactcctctcaatacccccgacccttctacaaagctgtctaccgaggccgatacagataccccgaaaaagttgatgttccgcagacttaagattattagcgagaactctatggactccgctatcagcgatgcaactagcgagttggagggtaaggatggcaaagaggacctggaccagctggagaacgttcctgttgaagaggaggaagagttgcagagccagcagcttctgccacagcagctcccagagtgtaaggtggactcagaaaccaatattgaggcaagcaagctgcctacctcagagccagaagccgatgccgagatcgaaccaaaagagtccaatgggaccaaactcgaggaaccgattaacgaagagacacctagccaggacgaggaggagggggtcagcgatgtcgagtcagaacgaagtcaggagcagccagataaaacagtagacatcagcgacctcgccacgaagcttctggactcttggaaggacttgaaagaggtttaccggatccctaaaaaaagtcaaacggaaaaagaaaacactaccactgagcggggcagggatgcggtaggatttagagatcaaactcccgctcccaaaacacccaaccgcagcagagagcgcgacccagacaagcaaacccaaaataaagagaaaagaaaa

SEQ ID NO: 239 - DNA, 1473 bp, synthetic construct
  source 1..1473: mol_type = other DNA
gccaccatgaggagaagctcactcagcccaccaagctctgcctatgaaagaggaaccaaaagaccggacgacagatatgatacccccaccagtaagaaaaaagtccgaatcaaggataggaacaaactgagtacagaggagagacggaagctctttgaacaagaggtcgctcaacgggaagctcaaaagcagcagcagcagatgcagaatctgggtatgacttctcccctgccttacgattctcttggctacaatgctccccatcatccctttgctggctacccaccggggtacccgatgcaggcttatgtggatccatctaaccctaatgccggaaaagtgctgctgcctactccaagcatggatccagtttgtagtccagcaccctacgaccacgcacagcctctggtgggtcattctacagagcccctttccgcacctccccctgtacctgttgtcccgcatgtggccgcaccagtagaggtctcatcttcccagtacgtagcacagtcagatggcgtggtgcatcaggattcctccgtggccgtgctgccagttcccgcgccaggtccggtgcaagggcagaattactctgtgtgggactccaatcaacagtcagttagcgtgcagcaacagtacagcccagctcagtctcaagcaaccatttactatcagggtcagacttgtccaaccgtctacggggtcactagcccttattcccaaactacgccaccaatcgtccaatcctatgcccagccaagtctgcagtacatccaagggcaacagatattcaccgcccaccctcagggagtggttgtgcagcccgccgcggctgttacaaccattgtggcccctggccagcctcagcctctgcagccatccgaaatggtggtcacaaacaacttgttggacctgccccccccctcccctcccaagccaaagactattgtgcttccacccaactggaaaactgctcgggaccccgaagggaagatctactattaccatgtgataactagacaaacccagtgggaccctcccacatgggagtcacccggagacgatgcttccctggagcacgaagctgaaatggatctgggcacgccgacatacgacgaaaatcctatgaaagcgagtaagaagccaaagaccgctgaagcagatacctcaagcgagttggccaagaagtccaaggaagtctttcggaaagagatgagtcagttcattgtccagtgcctgaacccctatcgcaaaccagactgcaaagttggacggatcaccaccaccgaggacttcaaacacctggctcgaaaattgacacatggggttatgaataaggagcttaagtactgtaagaaccccgaggaccttgaatgcaacgagaatgtcaagcataaaacaaaagaatacataaagaagtatatgcagaagtttggtgcagtgtacaagcctaaagaggataccgagctggag

SEQ ID NO: 240 - DNA, 2247 bp, synthetic construct
  source 1..2247: mol_type = other DNA
gccaccatggccgacgaagctgcactcgctttgcaacccggcggctcaccatccgcagcgggcgctgacagggaagcagccagcagccccgcaggggaacccctccggaaacgcccccgcagagacgggcctgggttggagagaagccccggggagccaggaggggcagctcccgagagagaggtgcctgcagctgcccgcggctgtccgggtgctgcagcagccgcgttgtggagagaggcggaggcggaagccgcagctgcgggaggcgagcaggaggcccaagccacagctgcagccggagaaggggacaatggtcctggcctgcagggaccctcacgggagcctcctctcgcagataacctgtatgatgaggatgacgatgatgaaggcgaggaggaggaggaggccgccgccgcggcgattggatatcgggataatctgttgttcggagatgagatcattacgaacggctttcattcatgcgagagcgatgaagaagatagagccagccacgcctcttcctccgactggactccccggcctcgaattggcccttatacttttgtgcagcagcacctgatgattggcactgatccacggaccattctcaaggatctgctgccggagacaatccctcccccagaactggatgatatgacattgtggcaaatagtgatcaacatattgtcagagccaccaaaaagaaaaaagcgcaaagacatcaatacaatcgaagatgcagtgaagttgctccaagagtgcaaaaagattatcgtcctcactggagcgggagtcagcgtgagttgtggcatccctgacttcagaagtcgggatggtatttacgccaggttggccgtggatttccccgacctccctgaccctcaagcaatgtttgatattgaatattttaggaaggacccccgcccgtttttcaaattcgccaaagagatttatcccggccaattccagccttccctgtgccacaaatttatcgctctgagcgacaaggaaggtaaactcctccgcaactatacgcaaaatattgatacgctcgaacaggttgccgggatccagaggattatacagtgccacggctcctttgctactgcatcctgtctcatctgtaaatataaagtagactgtgaggcagtgcgaggagacattttcaaccaggtggtgcccaggtgtcctcgctgtccagcagacgaaccccttgctattatgaagccagagattgtatttttcggtgagaaccttcctgagcagttccatcgggccatgaaatacgacaaggatgaggtagacctgctgatcgttatcgggagctcacttaaggtcaggccagttgctctgatccccagcagtatacctcacgaggtgcctcagatattgatcaaccgagaacctctgccccaccttcactttgacgtggagttgctgggtgactgcgacgtgatcataaatgaactttgtcacaggctgggaggtgagtatgcaaagctgtgctgtaaccctgtgaagctttctgagatcaccgaaaagccccccaggactcagaaagaactggcctatctgagcgagctgcctcctactcctctgcatgtcagtgaggacagctcctctccagagaggacttctcctcctgatagctccgttatcgtgacacttttggaccaggcagccaagtccaacgacgacctggacgtttctgagtctaagggctgtatggaagagaaacctcaagaggtccagacatcacgcaacgttgaatccatcgccgaacagatggagaatccagatctgaagaacgttggtagtagcaccggggagaagaacgagcgcacaagtgtcgcaggaaccgtccgcaagtgttggcctaaccgcgtcgcaaaggagcagatatctcggcggcttgatggtaaccagtacttgttcctccctccgaatcggtacattttccacggcgctgaggtgtacagtgactcagaagacgacgtcctttcaagctcctcttgcgggagtaatagcgacagtgggacctgtcaaagtccttctctggaagaacctatggaagatgagagtgagatcgaggagttttataacggcctggaagacgaacccgacgtgcctgaacgcgcaggcggggccggttttggaaccgacggtgacgaccaagaggccatcaacgaagctataagcgttaaacaggaggtgactgacatgaactacccttcaaataagtca

SEQ ID NO: 241 - DNA, 2757 bp, synthetic construct
  source 1..2757: mol_type = other DNA
gccaccatggatcttagagtgggccaaagaccccccgtggagccgccaccagagcccaccctgctggccctccaacggccgcaaagacttcatcaccatctgtttctggccggcctgcagcagcagagatccgttgaacccatgcggttgtccatggataccccaatgcccgaattgcaggttggaccccaggaacaggagctgaggcaacttctgcacaaagacaaaagtaaacgctcagccgtcgcgagttcagtggtaaagcagaagctggcagaagtcatcctgaagaaacagcaggctgctcttgagagaaccgtgcacccaaattccccaggtataccttaccgcaccctggagcctctggagaccgagggggctaccaggtccatgctgtctagctttctgccccccgtcccgtcactgcctagcgacccgcctgaacacttcccattgaggaagacggtttccgaacctaacctgaagcttcgctataagcctaaaaaaagcctcgaacgcagaaaaaacccactgttgcgaaaagagtcagcccctccttctcttagaagaaggccagcagaaacactgggagacagcagccccagctcctccagcactcccgcttcagggtgcagcagtcctaacgatagtgagcacgggccaaaccccatcctcggatccgaggcgctcctgggccagaggcttagactgcaggaaacctcagtcgcgccctttgccctgccaaccgtctcactgttgcccgccataaccctgggacttccagcgcctgcccgggctgatagcgaccggcgcacacacccgacgctgggtccacgcggcccaattctgggtagcccccacacacctctttttttgccacatggtctggagcccgaggccgggggaaccctcccatcaagactgcagcctatactcctgctcgatcctagcgggtctcacgcccccctgctgaccgtgcccggcctgggaccactgccttttcattttgcgcagagtctgatgaccacggagagactgtctggaagcggcttgcactggccactctcccgcactagatctgagcctctgcccccgtcagctaccgcccccccgcccccaggcccaatgcagcctaggcttgaacagctgaagacccacgtgcaggttattaagcggagcgcaaaaccctccgaaaagcctcggctgaggcagatcccaagtgccgaggacctggagaccgacggtggcggcccagggcaggtggtcgacgacggcctcgagcatcgggaattgggtcatggacagcctgaagccagaggtcccgcaccgcttcagcagcacccacaggtgcttctttgggaacagcagagacttgccggtcggctgcctagggggagcaccggcgacacagtcctgcttccgctcgcgcaaggtggccaccgccctctctctcgcgcgcaatctagcccagccgcacctgcctcactgtccgcccctgagccggcttctcaggcccgcgtgctgagctcctccgaaaccccagctagaacactgccgtttaccactggcttgatatacgactctgtcatgctgaagcatcagtgctcctgtggagataactctcggcatcctgagcacgccggtagaatccaaagtatctggtcccgcctccaagagagaggactgcggagccagtgtgagtgcctccgcggccggaaagccagtctcgaggagctgcagagtgtgcactctgagagacacgtccttctgtacgggaccaatccgctttccaggttgaaactggacaatggaaaattggccggcttgctggcccagcgcatgtttgtgatgctgccctgtggtggagttggagtggatactgacactatctggaatgagctccacagttctaacgctgccaggtgggctgcgggctcagtgactgatcttgccttcaaagtggcatcaagggaattgaaaaatggtttcgccgtcgtgcggcccccggggcatcatgcagatcacagcaccgctatgggcttttgctttttcaactccgtcgcgatcgcttgccggcagctccagcagcagagtaaggcgtccaagattctgatagtggactgggacgtgcaccacggtaacgggacacaacagacattctatcaggaccccagcgttttgtacatcagcctccaccggcacgatgacgggaacttttttcccggcagcggcgccgttgatgaggtcggcgcggggtccggagagggatttaacgtcaatgtggcttgggcaggaggcctggaccctcctatgggcgaccccgagtatcttgctgcatttcgaattgtggtgatgcccatcgctcgcgaattttccccggacctggtcctcgtgagcgccgggttcgatgcagccgaaggccatccagcaccactgggtggctatcacgtcagcgccaagtgcttcgggtacatgacacagcagctcatgaatttggccggcggcgctgtggttttggcactggaaggtggacacgatttgactgctatctgtgatgcttcagaagcgtgcgtagccgctctgctgggcaatcgggtggatcccttgtcagaggagggctggaaacaaaaacccaacctgaacgccatccgctctctcgaggccgtgatccgcgttcactccaagtactgggggtgcatgcagagactggcaagttgtcctgactcttgggtccctagggtgccgggggcagataaa

SEQ ID NO: 242 - DNA, 1113 bp, synthetic construct
  source 1..1113: mol_type = other DNA
gccaccatggactcactggaccatatgttgaccgatcccctggaacttggtccctgcggggacggccacggaacaaggattatggaagattgcctcctgggagggacaagggtgtctctgccggaggatctccttgaagatccggaaatattctttgatgtcgttagtttgtccacgtggcaggaagtgctgagtgacagccagcgcgaacacctccagcaattcctgccacaattccccgaggactcagctgagcaacagaacgagcttattctggccctgttctctggggaaaactttaggttcgggaacccactccatatcgcccagaagctttttagagacggtcatttcaacccagaggtggttaagtatagacagctgtgctttaagagccagtacaagagatatctgaatagccagcaacaatactttcacaggctgttgaaacagatccttgcttcacggtcagatctgctggagatggctcggaggtctggccccgccctgccctttcgacagaagaggccaagcccctcaaggacccccgaggaaagagagtggcgcacacaacagagatatctgaaggtcctcagggaagttaaagaagagtgtggcgacaccgccctgtctagcgacgaagaagatttgtcctcatggttgccatcatcaccagcaaggagtcccagtccagcggtgcctctgcgagtggtgccaacgctcagcaccactgatatgaagactgcagataaggtggagctgggcgattcagacctcaagatcatgcttaaaaagcaccacgaaaagagaaagcatcaaccagaccatcctgatcttcttacgggcgatcttacgctgaacgacataatgacgcgcgttaacgcaggccggaaagggtctcttgcagctctgtacgacctcgccgtgctgaaaaagaaggtgaaggagaaggaggagaaaaagaagaaaaagattaagactattaaatctgaagcagaggaccttgccgaacccctctctagcacagaaggggtggcacctctgtcacaagcaccatctcctcttgccattccagccattaaggaagagccacttgaagacctgaagccatgc

SEQ ID NO: 243 - DNA, 2421 bp, synthetic construct
  source 1..2421: mol_type = other DNA
gccaccatggacgcaacaacacctgtgccacgcgtgagaacggattacgttgtgagaccatctaccggagaagaaaagcgggtgttccaggagcaagagaggtatcgatattctcagccgcacaaagcatttacatttcgcatgcatggttttgagagcgtcgttggtccagtcaagggcgtcttcgacaaggagaccagccttaacaaggcgcgggaacatagtctgctccgctccgatcgcccagcttatgtaaccattctgagcctggtgagagatgccgcagccaggctgccaaatggagaggggactagggccgagatctgcgagcttttgaaggattctcagtttttggctcctgacgtgacgagtacacaggtaaataccgtggtgagcggggcacttgacaggctgcattatgagaaggacccctgtgtcaaatacgatatcggtaggaagctgtggatttacctccatcgcgacaggtcagaggaggagtttgaacgcatccatcaggcccaagccgccgctgcaaaggctagaaaggcccttcagcagaaacctaagcccccttccaaggtgaagtcctcttctaaagagtcctcaatcaaggtgctgtccagcggtccctctgagcaaagccaaatgagcctgagcgactcatctatgccaccaacaccggtcactccggtaacaccaaccaccccagcgcttcctgctattcccatcagtcccccaccagtgagtgccgtaaataagtctggccccagcactgtgtccgaacccgccaagagcagttctggcgtactgctggtgtcttcacctaccatgcctcacctgggcacaatgctttcacctgcatcttcccagactgcccccagctcacaagcggctgcgagggttgtgagccacagtggttctgccggactgtctcaagttagagtggtggcccagccttctctgcccgcagtgccgcagcagagcgggggaccggcacagacgcttcctcagatgccagctggcccccagatcagggtacccgctactgctacgcagaccaaggtcgtgccacagaccgtcatggccaccgtgccagtaaaggcccagaccaccgcagcgacagtccaacgccccggccccgggcagaccgggctgacagtcacatccctgccagccacggctagtcccgtttctaagcccgccacaagcagcccggggacttctgctccatctgcctctacagcggctgtgatccagaatgtgacaggccaaaacatcatcaagcaggtggcgatcactggccagctcggtgtgaaaccacagacaggtaacagtatcccccttactgccactaattttaggatccagggtaaagatgttctgagacttccccctagctccatcaccaccgatgcaaagggtcagacagtactgagaatcacccccgatatgatggcaacactggccaagagccaggtgacaaccgttaaactgactcaggacctgtttggcacagggggaaatacgaccgggaagggaatatccgcaacgctccatgtgacttccaaccccgttcacgctgccgatagtcctgctaaggctagtagcgcgagcgcaccaagtagtaccccaaccggtacaactgtggtcaaagtgacacccgacctcaagcccacagaggcttcatcttctgctttccgcctgatgcccgcgctcggagtgagtgtggccgatcagaaggggaagtctactgtggccagctctgaggccaagccagccgcgacgatcaggattgttcaaggcctgggggtgatgcctcctaaggccggccaaacaatcactgtagcgacccacgcaaaacagggtgcaagcgtggctagcggaagcggcaccgtacatacatctgccgttagtctcccgagcatgaacgccgcggtatctaaaaccgtggccgtggcttcaggcgctgcgagcacccccattagtattagcacaggggcacccactgtgcgacaggtgcccgtgagtacgactgtagtttctaccagtcaggcgggcaaacttccaacacgaatcactgtcccactgagtgtcatcagccaacctatgaaagggaagagcgtagtgacagcgcctattatcaaggggaatctgggtgcgaatctctccggtttggggcgaaatattattttgactacaatgcctgcgggcaccaagcttattgctggcaacaaaccagtcagtttcctcacagcacaacaactccaacagctccaacaacagggacaggccactcaagttaggattcagaccgtcccagcatcccatctgcagcagggtacggccagcggctctagcaaggctgtttccaccgtcgtggtcacgaccgccccaagtcccaagcaagcccctgagcagcag

SEQ ID NO: 244 - DNA, 1005 bp, synthetic construct
  source 1..1005: mol_type = other DNA
gccaccatggagtgcagcaaacctcaggaggcctttggcttcgaacaggcagctagagattacactctgagaaccttcggtgagatggccgacgcctttaagtcagactactttaatatgccagtacacatggtgcccaccgaactggtagagaaggagttctggcggctggtttccaccatagaagaggacgtgaccgtcgaatacggggcggatatagcatcaaaggagttcggatccgggtttccagtgcgcgacggtaaaattaagctcagtcctgaagaggaagaatacctggattctggatggaacttgaataacatgccagtaatggaacaatctgttctcgcacatattacagccgatatatgtgggatgaagctcccatggctctacgtggggatgtgtttcagctctttttgctggcatatcgaggatcactggagctattccataaactacttgcattggggagagcctaaaacttggtacggcgtgccaggatatgcggcggaacagctggagaatgtgatgaaaaagctggcacctgagttgttcgtgagtcagccagatctgctccaccagctcgtgacaataatgaatcctaataccctgatgacacacgaagtccccgtctatcggacaaatcagtgcgccggcgagttcgtcatcactttccctcgggcctatcactctggatttaaccagggattcaacttcgctgaagcagtcaatttttgcacggtcgactggctgcccctgggcagacagtgtgtggaacattaccggctgctccatagatactgtgtgttctcccatgatgagatgatatgtaaaatggccagcaaggccgacgtgctggatgtggttgtggccagtactgtgcagaaagatatggccattatgatcgaggatgagaaggcacttagagaaaccgtgaggaaacttggggtcattgattccgaaagaatggactttgaactgctgcccgacgacgaacggcaa

SEQ ID NO: 245 - DNA, 3039 bp, synthetic construct
  source 1..3039: mol_type = other DNA
gccaccatgcactccatgatatctagtgttgatgttaagagtgaagttccagtcgggctggaaccaatctcccccctggatctgagaacagatcttcggatgatgatgcctgttgtggacccagttgtgcgggagaagcagcttcagcaggagctgttgctgatccaacagcagcagcagattcaaaaacagctgctgatagctgaatttcaaaaacagcacgaaaatctgacaaggcaacaccaggcccaactgcaggagcatataaaggagcttcttgctatcaagcagcagcaggaacttcttgaaaaggagcagaaactggaacagcaaagacaggagcaagaggtagagaggcaccgaagggagcagcagctgccccctctgcgggggaaggataggggccgagagagggcagtcgcatctacggaggtgaagcagaagttgcaggagttcctgctgagtaagtcagctaccaaagacacccccaccaatggtaagaatcattctgtgagtaggcaccccaaactgtggtacacagctgctcaccatactagtcttgaccagtcatctcccccgctgtctggcacctcccctagttataaatatactctgcccggggcgcaggatgccaaggatgatttccccctgaggaaaactgcgtcagaacctaatttgaaggtgagatccaggctgaagcaaaaggtcgcggagagacgcagttccccactcctgcgacggaaggacggcaatgtcgtcacctcattcaagaaaaggatgttcgaggtgactgagagttcagtttcttcttccagcccggggtctggaccttcttcaccaaataacggaccaacaggatcagtgactgagaatgaaacatccgttctgccccctaccccccacgctgagcagatggtgtctcagcagcggattttgattcacgaagattcaatgaacctgcttagcctctacacttctccctccctgcctaatatcacactcggactccctgccgtaccaagccagctcaatgcctcaaatagtcttaaggagaagcagaaatgcgaaacacagaccctgcgccagggagtgccgctgccgggacagtatgggggcagcataccagcctcatccagccatccccatgttaccctggaggggaaacctcctaacagtagccaccaggccctgcttcaacacctccttctgaaagagcaaatgcgacaacagaagcttctggtagctgggggcgttcccttgcatcctcaaagcccattggccaccaaggaaaggatctcccccgggattcgcggaactcataagttgcctaggcatcggcccctgaatagaacccagagcgcccccctgccacagtctacacttgctcagctggttattcagcagcagcaccaacagtttctggagaaacagaagcagtaccagcagcagatccacatgaacaaactcctgtctaaatccatcgagcaactcaagcagccaggctctcacctcgaagaggccgaagaagagcttcaaggggatcaggccatgcaggaagaccgcgccccaagctctggcaatagtacccgatccgatagcagtgcctgcgtggacgacaccctcggccaggtgggggccgtgaaagtgaaggaagaacccgttgactctgatgaagatgcccagatccaagaaatggaatccggagagcaggcagctttcatgcagcagcctttcctcgagccgacacacacgcgcgcactctccgtgagacaggcgccactggccgcagttggaatggacggactggaaaagcatcgcctggtgtctcgcactcacagttctccagccgcctcagtattgccccacccggccatggacagaccactgcaaccgggaagtgctacaggaatagcctatgatccactgatgcttaagcatcaatgcgtttgtggaaactctaccacacatcccgagcatgctgggagaatacagtctatctggtcccgactgcaagagacaggtctccttaacaagtgcgaaagaatccagggaaggaaagccagcctggaggagatccaattggttcacagcgagcaccactctcttctgtatgggaccaaccccctcgacggacagaagttggatccacggatacttttgggcgacgattcccagaaattcttttcttccctgccatgtgggggcttgggcgtagacagcgatacaatttggaacgaacttcactcatctggcgccgccaggatggccgtgggatgcgtgattgaactggcctccaaagtggcatccggggaattgaagaacggttttgcagtggtacgccctcctggccaccatgccgaagaaagcactgcaatgggcttctgcttctttaacagcgtggcaatcactgctaagtatctcagagatcaactgaacattagcaagattctgatcgtggatctggacgttcaccacggaaacggaacccagcaggcgttctatgccgaccctagtattctgtacatcagcctgcacaggtacgatgaagggaatttcttcccaggcagcggagctccgaacgaggttggcaccggcctcggggagggctacaatataaacattgcctggacagggggactcgatcctcctatgggggacgtggaatatctggaggccttccggaccatagtcaagccagtggccaaggaatttgacccagatatggtactggtctctgccggattcgacgcattggagggccacacaccacctcttgggggatacaaggttacggctaagtgcttcggtcatcttacgaagcagctgatgaccctcgcagacggaagagtggtcctcgcactcgagggtgggcacgacctgacagctatatgcgacgcgagtgaagcatgcgtgaatgcacttctcgggaatgagttggaaccgctcgccgaggacatattgcaccagtcaccaaatatgaacgccgtgatctcccttcagaaaatcatcgagatacaaagcatgtccctcaaattttcc

SEQ ID NO: 246 - DNA, 444 bp, synthetic construct
  source 1..444: mol_type = other DNA
gccaccatgccctcagggcatccccggtttcggtacaaagaacacgaagacggctacatgcgcctgcagcttgtgcggtatgagtctgtggagctgactcagcagcttctgaggcaacctcaggaaggcagcggtctgggaacatctctgaacgagagctccctgcaggggatcatattggagaccgttccgggggaacccggccgaaaggaggaggaggaggagggcaagggatctgaagggacagctttgtctgccagccaggataacccctccagcgttatccacgtggttaatcagacaaatgctcaaggacagcaagaaatcgtttactacgtgttgtctgaggctcctggtgagcctccacccgcgcctgagcctccaagcggaggcattatggagaagcttcagggaatagctgaagaacccgaaatccagatggtg

SEQ ID NO: 247 - DNA, 2931 bp, synthetic construct
  source 1..2931: mol_type = other DNA
gccaccatgtggatcttggacacagatactttcaatgaatggatgaacgaggaagattatgaagttaacgacgacaaaaatcccgtaagtagaaggaaaaaaatctctgcaaagaccctcactgatgaagtgaattcccctgattcagaccggagggacaagaaaggaggcaactacaaaaaaaggaagaggagcccctctccgtctcctacacctgaggcgaagaaaaagaatgccaagaaaggtccatccactccctacacaaagagcaaacggggacacagggaggaagaacaggaggacctgactaaggatatggatgaacctagcccagtgcctaatgtcgaagaagtgactctgcctaagacagtgaatactaagaaggattcagaatccgcaccagtgaaaggtggaacaatgaccgaccttgatgagcaggaggatgagtccatggagacaactggcaaggatgaagacgaaaattccaccggtaacaagggcgagcagaccaaaaatcctgacctgcacgaggataacgtgaccgagcagactcaccacataattattccttcttatgcagcgtggttcgattacaactccgtgcatgcaattgaacgcagagctcttcccgaattcttcaatggaaagaataagtcaaaaaccccagagatatatctggcgtacagaaattttatgatcgatacctacaggctgaatccccaggaataccttaccagcactgcttgtagacggaatcttgccggggatgtgtgcgcaatcatgcgagtgcacgcctttctcgagcagtggggtctgattaactaccaggtggatgccgaaagccgccccacccccatgggccctcccccaacgtcccattttcacgtgcttgctgataccccgtccggtctggtccccctgcaaccaaaaactcctcagcagacaagcgcctcccaacaaatgttgaacttcccggacaaaggcaaggaaaagccaacagatatgcagaatttcggcctccgcactgacatgtatactaagaagaatgtgccgtctaagtctaaagcagctgcttccgccacacgggagtggactgaacaagaaactttgctgctcctggaagccctggaaatgtataaagacgactggaacaaagtttctgaacacgtgggctcccgcactcaggatgagtgcatccttcatttcctgcgccttccaatcgaagacccttaccttgaggattctgaggccagcctgggacctctggcttaccaacccatccctttctctcagtcaggaaacccagtaatgtcaaccgtggcatttctggctagcgtagttgacccaagggttgctagtgccgccgccaaatccgccttggaggagtttagcaagatgaaagaggaagtacccacagctcttgtggaggctcacgtcaggaaagtggaggaggctgcaaaggtgacaggcaaagctgacccagcatttggactggagtctagcggcatcgccggcactacatctgacgaaccagaacgaattgaggagtccggcaacgatgaggctagggttgagggtcaggccaccgacgagaaaaaagaaccgaaggagccacgagaaggcggtggcgctatcgaagaggaagcaaaagagaaaactagcgaggcccccaagaaggacgaggagaaaggcaaagaaggagatagcgagaaagaatccgagaaatcagacggtgaccctatcgtggatcctgaaaaggagaaggagcccaaagaaggccaagaagaggttctcaaagaagttgtcgaatctgagggagaacgcaaaaccaaagtcgagcgagatataggcgaaggaaacctctccacagccgctgctgccgccctggccgctgccgctgtgaaggccaaacatctggctgctgttgaggaacggaaaatcaagtcacttgttgcactgctcgtggaaacccagatgaagaaactcgagatcaaactgcggcacttcgaggaactggaaacaattatggacagagaacgggaggcgctcgaataccagaggcagcagctgctggcagatcggcaggcctttcacatggagcagctgaagtatgccgaaatgcgggcacgacagcaacactttcaacagatgcaccaacaacaacagcagcctccacccgctctgccgccagggtcacaacccatccctccaaccggtgccgcaggccccccagcagtacacgggctggctgtggcccctgctagcgtcgttccagcccccgctggcagcggagcgccgcctggttccctgggccctagtgaacagataggacaggctggctcaacggccggcccccagcagcaacagccagcgggggcaccccagcccggcgcagtgccgccaggcgtcccccctccagggccacacggcccaagtcccttcccaaatcaacaaactccgccttccatgatgcctggggccgttccaggcagcggtcacccaggcgtggcagggaatgctccacttggcctgcctttcgggatgccccccccacctcccccacctgccccctccatcataccattcggcagtctcgcagactccatctccatcaacctgcctgcgcctcctaatttgcatggacaccaccaccatctcccctttgcaccaggaaccctgccacccccaaatttgcccgtgtccatggcaaaccctcttcaccctaatctgcctgccaccaccactatgccgtccagccttccgctcggacctgggctggggagcgcagccgcccaatctcccgctatagtggccgctgtacaaggcaacctgttgccctctgccagccctctgcccgaccccggaaccccgctgcccccggaccctaccgctccatcccccggcactgtcacacccgttccaccccctcag

SEQ ID NO: 248 - DNA, 1830 bp, synthetic construct
  source 1..1830: mol_type = other DNA
gccaccatggcagctgccgcggctgcagtggggccaggggccggcggcgccggaagcgctgtgccagggggagcagggccatgcgcaacagtcagcgtgtttcctggcgccagactcctcactatcggcgatgcgaacggggaaatccagagacacgcagaacaacaggccctgcggttggaagtgagggccgggcctgacagtgcgggtatcgctctgtattcccacgaggatgtctgcgtctttaagtgctccgtgtctagggaaactgaatgctctcgcgttggcaaacagtcattcatcatcactctgggctgtaactccgtgctgatccagttcgcaacccctaacgatttctgctccttctataacatcttgaaaacctgccggggacatacgctcgagaggtcagtgttctctgagaggacagaggaatcctcagctgtccagtacttccagttttacggctatctttcacagcaacagaacatgatgcaagattacgttaggacaggcacgtaccaacgggccatcctgcagaatcatacagatttcaaggataaaatagtgctcgacgtgggatgcggttctggcatcctcagctttttcgccgctcaggccggtgctcgaaaaatctatgctgtggaagctagtaccatggctcagcacgctgaggtactggtgaagtccaataaccttactgaccgcattgtggtgatccctggaaaggtcgaagaagtttctttgccagagcaggtggacattatcatttccgagcccatgggctatatgctttttaatgagcggatgcttgagagctacctccatgccaaaaaatatctgaaaccaagtgggaatatgtttcccaccataggcgacgttcacctcgcacccttcacagacgagcagctttatatggagcagttcaccaaggcaaatttttggtatcagccaagcttccatggtgtggatcttagcgccctccgcggggccgccgtggacgagtactttcgacagcccgtggttgacacgttcgatattcgaattctgatggcaaaatccgtgaaatatacagtcaattttttggaagccaaagaaggcgatctccaccgcatcgaaattccatttaagtttcatatgctgcattcaggactggtccacggtctggccttttggtttgacgtggcctttataggaagtatcatgacagtttggctgtccaccgcaccaaccgagcccctcacgcattggtaccaagtccggtgtttgttccagagtcctctctttgccaaggcaggtgatactctctctggcacctgtctgctgatagccaataaacgacagtcttatgacatctcaatcgttgcccaggtagatcagaccggttctaagtcctccaatctgctggatctgaaaaacccatttttccgatacaccggtactacaccttctccgccacccggctcacattatacgagcccatctgagaacatgtggaacacaggaagtacctataacctgtcctccggcatggctgtggccggaatgcctactgcttatgatttgtccagcgtgatcgcatctggttcaagtgtgggtcataacaatctcattccattggccaacaccggcatcgtgaatcatacccacagccgaatgggcagcataatgagcaccgggatcgttcagggctccagcggggcacaggggagcgggggcgggtctactagcgcacattacgccgtcaactctcagttcactatggggggccccgccataagtatggctagccccatgtctatcccaactaatactatgcactatggctcc

SEQ ID NO: 249 - DNA, 2244 bp, synthetic construct
  source 1..2244: mol_type = other DNA
gccaccatggcggagcccagccaggctcccacccctgcccccgcggcgcagccaagaccattgcaaagtcctgcacccgccccaacacccaccccggctccctcccccgcttctgcacctatcccgaccccaactccagcccctgcccctgcccctgccgctgcccccgctggctcaactgggactggtggaccgggagtaggttctggtggagccggatctggcggggacccagctagacctggtctgtcacagcaacaacgcgcttcccagcggaaagctcaagtccgcggactgcccagagccaagaagttggaaaagttgggagtgtttagtgcctgcaaggcaaatgagacatgtaagtgcaatggatggaagaatcctaaaccccccacagcccccagaatggacctgcagcagccggctgcgaatctgagcgagctgtgcagaagttgcgagcatcctctggccgaccacgtcagccatctggaaaatgtctctgaggacgagattaatagactcctgggaatggtcgtagatgttgaaaacctgtttatgtcagtgcacaaggaggaagacaccgacactaagcaggtctatttctatcttttcaaactgcttaggaagtgcatcttgcagatgacccgacctgtagtggaaggatctcttggaagcccgccctttgagaagcccaatatcgagcaaggggtgctcaattttgtgcagtacaaattcagccatctggcacctagggagaggcagaccatgttcgaactgtctaagatgttccttctttgtttgaattattggaaactcgaaacccctgctcagttcagacagcgctctcaggcagaggacgttgcaacctacaaggtgaactacactcgctggctgtgctactgccacgtgccacagtcatgcgacagtcttccacggtacgagacaactcacgtgtttggcaggtccttgcttagatctattttcactgtcaccagacggcagctgctggagaaattccgggtcgaaaaggataaattggtcccggagaaaagaactctcatactgacgcactttcctaaatttctgtcaatgctggaggaggagatctacggtgcaaacagccccatctgggagagcgggttcacgatgcccccaagcgagggcacacaactggtccctcggccagcctccgtgtcagctgcagtggtgcccagcacgcctatattctccccctcaatgggagggggatccaatagtagtctttcattggacagcgctggagccgagcctatgcctggcgagaagagaacactccctgaaaatctgacactggaggatgcaaagaggttgagggtgatgggcgatattccgatggaactggtgaatgaagttatgttgacaatcacagatcccgctgcgatgctggggcccgagactagccttcttagcgctaacgccgcaagagatgagacggcccggctggaagagaggcggggcatcatcgagttccatgtgatcgggaacagcttgacccctaaggcaaataggcgggttctcctctggttggtcgggttgcaaaacgtgttttctcaccaattgccccggatgcccaaggaatacatcgcacggctggtgttcgacccaaaacataagacacttgcactgatcaaggatggtagagtgatcgggggtatttgtttccgcatgtttcccactcagggctttacagaaattgtgttctgtgccgtgaccagtaacgaacaagtaaaaggctatgggacccatcttatgaaccatctgaaagagtaccacattaaacataacatactgtactttctgacttacgccgatgaatacgcaatcgggtacttcaaaaaacagggcttctctaaggacatcaaggtccccaagtccagatatctcggttatataaaggactacgagggtgccaccctgatggaatgtgagttgaacccacggatcccttacactgagctcagccatatcattaaaaaacaaaaggagattatcaaaaagcttatcgaacggaaacaggcgcaaatcagaaaagtgtacccaggactcagctgctttaaagaaggtgtccgacagatacctgtggaaagcgtgcccggcattcgcgagacaggctggaaacctctgggaaaagagaagggcaaagagctcaaggacccggatcagctctacacgacgctcaagaacctgctggcccagataaaaagc

SEQ ID NO: 250 - DNA, 1545 bp, synthetic construct
  source 1..1545: mol_type = other DNA
gccaccatggccgaggtgggggaaatcatcgaaggctgcagactgcccgtcctccggcgcaatcaggacaatgaagacgagtggcccctcgcagagatattgtccgtcaaggatatcagtgggcgcaaactgttctacgtccactatatcgactttaataaaagattggacgaatgggtgacccacgaaaggctcgacctgaagaaaattcaatttcccaagaaggaagcgaaaactccaaccaagaacgggcttcccggctctagacccggtagccctgagcgggaggttccagcttccgcacaggctagcggcaaaacactgcctattcccgtccaaattactctccggttcaacctgcctaaggaacgggaggccatccccggtggggaacctgaccagccgttgagttcctcctcctgtctgcagccgaatcacaggagtaccaaacgaaaagtggaagtggtaagtcctgctacaccggtaccctccgaaacagccccagctagcgtgttcccccagaatggagcggcaagaagagctgtcgctgctcaacctggcagaaagagaaagagcaattgccttggaactgacgaggattcacaagactcctccgatggcatacccagcgctccaaggatgactggcagcctggtttccgatcggagccatgacgacatcgtcacgcggatgaaaaatattgagtgcattgagctgggacgccataggttgaaaccatggtattttagcccttacccgcaagaacttacaactctgcccgtgctgtacctgtgcgaattttgtctgaagtacggccgatccttgaagtgccttcaaagacatctgactaaatgtgatctcaggcacccgccagggaacgagatatatcgcaaagggacaatcagcttttttgaaatcgatggccgcaagaataagagctatagtcaaaacctgtgccttctggctaagtgcttcctcgatcataagaccctctactatgacaccgatcccttcctcttttacgtgatgaccgaatacgattgtaagggcttccacattgtcggatatttttctaaggaaaaggagtcaaccgaggactataacgtggcctgtattcttacacttcccccctaccagcgccggggatacggtaaacttctgatcgaattctcttatgaactgtccaaggtcgagggtaagactggcactccagaaaaacctttgtccgatctgggactgctgtcatatagatcttattggtcacagactattttggaaattttgatggggcttaagagtgagagcggcgagcgcccacagatcaccatcaacgagatatccgagatcacttctatcaaaaaggaggacgtcattagcaccttgcagtatctcaatcttattaattattacaaaggacagtacatcttgaccctctccgaggacattgtggacggccacgagagagcgatgcttaaaaggttgctgcgcattgatagcaagtgtctgcacttcacccccaaagactggtctaaaagaggaaaatgg

SEQ ID NO: 251 - DNA, 3081 bp, synthetic construct
  source 1..3081: mol_type = other DNA
gccaccatgcaccgcaagaaggtcgataacaggatccgaatcctcatcgaaaacggcgttgccgaaagacagaggtcactcttcgttgtcgtcggggaccgcggcaaagatcaagtcgtcatcttgcaccatatgttgtctaaagccaccgtcaaagccaggccctccgtactgtggtgctataaaaaagagctcggcttttctagccaccgcaagaagaggatgcgccagctgcagaaaaagatcaagaacggcaccttgaatattaagcaggacgatccttttgagctcttcatcgcggctaccaatatccgatactgttactataacgaaactcacaagatactgggaaatacctttggtatgtgtgtcctccaggatttcgaagccctgacccccaaccttctggctcgaacagtcgagacagtggagggcggtggtctggttgtcatcctgctgaggaccatgaattcactcaaacagttgtatacggtgacgatggacgtgcactcccggtacagaacggaggcccaccaggatgtggtggggaggtttaacgagaggtttattctctccttggctagctgtaaaaagtgcctggtcattgacgaccagttgaatattctgcctatctcatcccatgtggctaccatggaagcgttgcccccgcaaaccccagatgaatcactcggaccttccgacctcgagctgcgggagctgaaagaatcactgcaggacactcaacctgttggtgttcttgtggactgctgcaaaacgttggatcaggctaaggcagtgctcaaatttatcgagggaatcagcgaaaagactctgcggtcaacagtcgctctcaccgcagcccgcggccggggcaaaagcgccgcactgggcctggcgattgcaggtgcagtggctttcgggtactccaacatttttgtaaccagcccctccccagataacctgcacacactgtttgagttcgtttttaagggctttgacgcccttcagtaccaggagcaccttgactatgaaatcatacagagccttaaccccgagttcaacaaggcagtgattagagttaacgtttttagagagcaccggcaaaccatccagtacattcatcctgcagacgctgtcaagcttgggcaggcagaactggttgtgatcgacgaggctgcagccatcccactccctttggttaaatcactgctcggaccttacctcgtgtttatggcaagtacaatcaatggctacgagggcacaggtcgcagcctgtccttgaagttgatccagcagctgcggcagcagtcagcacagtcccaagtttcaaccacagctgagaacaaaaccactacaacagccaggttggcatctgcaaggactctgtatgaggtgtcactccaggagtccataagatatgcccccggagacgccgttgaaaaatggcttaatgatctgttgtgccttgactgcctgaacattaccagaatagtgtccggatgccctctcccagaagcctgtgagctgtattacgtgaacagagatacgctcttttgttaccacaaagcatccgaagtgttcttgcagcggctgatggcactctacgttgcaagccactacaaaaactctccaaacgaccttcagatgctgagcgacgcacccgctcatcacctcttttgcctgctgcctccagtcccaccaacccagaacgccctgcccgaggttctcgccgttattcaggtgtgtttggaaggcgaaatcagccgacagagcattctgaactcccttagccgcggcaaaaaggcaagtggggatctgatcccatggaccgttagcgagcaatttcaggaccctgatttcgggggtctctctggaggcagggtggtgcggattgctgtccatcctgactaccaggggatggggtacggcagccgggctctgcagttgcttcagatgtattatgaggggcgctttccttgtttggaggagaaagtcttggagacaccccaagaaattcacacagtaagcagtgaagccgtctccctgctggaggaagttattactcctcggaaggatcttccaccccttcttcttaaacttaacgaacggccagctgagaggctggattatctgggagtgtcttacggtctgacacctaggctgcttaaattctggaaaagagccgggtttgttcccgtgtacctgagacagacacccaacgacctgactggtgagcattcatgtatcatgttgaagactctcacggacgaagatgaagcagatcagggcggctggttggctgcgttttggaaggatttccgaaggaggttcttggcactgctcagttatcagttcagcactttctccccgagcttggctctgaacataattcaaaaccgaaatatgggtaagcccgcccagcccgcactctctagagaggaattggaagctctctttctgccgtacgatctgaagcgactggaaatgtactcaagaaacatggtggattatcacttgatcatggacatgattccagccatctcccggatctactttctgaaccagttgggggacctcgctctgtcagcagcccagagcgcgctgctgcttgggatcggattgcaacacaagtcagtagaccagctcgagaaggagattgaactgccctcaggtcagttgatgggcctctttaaccggattattaggaaagtagtcaaactgtttaatgaagtgcaggaaaaagccattgaggagcaaatggtagcggccaaggatgtagttatggaacctaccatgaagaccctgagcgacgatttggatgaagccgccaaggagttccaggaaaaacacaagaaggaagttgggaaactcaagtctatggatttgtcagaatacattattcggggagacgacgaagagtggaacgaggtactcaacaaggccggcccaaatgcgagcatcatcagcctgaagagtgataagaagaggaagcttgaagctaagcaagagccaaaacaaagtaaaaagctgaaaaaccgcgagaccaagaataaaaaagatatgaagttgaagagaaagaaa

SEQ ID NO: 252 - DNA, 1254 bp, synthetic construct
  source 1..1254: mol_type = other DNA
gccaccatggcaggcgatacacattgtccagcggagccactggcgagagagggtaccctgtgggaggcgcttcgggccctgctcccgcactcaaaggaggacctcaagcttgatctgggcgagaaggttgagaggtctgtggtaactctgctccaacgggctacggagctcttctatgaaggacgcagggacgaatgcctgcaaagttctgaagtcattctggattacagttgggagaagcttaatactggtacgtggcaagacgtggacaaggattggaggcgggtctacgccatcggatgccttctcaaggccctgtgcctgtgccaggcccccgaggatgctaatacagttgcagctgccttgcgagtttgcgatatgggcctgctcatgggagccgccattctgggtgatatcctgctgaaagtagccgctatcctgcagacgcatctccccgggaaaagacctgcccgcggctctctgcctgagcaaccctgcaccaagaaagccagagcggaccacggcctcataccggatgtgaaattggagaagacagtcccccgattgcacaggccgagcttgcagcacttccgcgaacagttcttggttcctgggcgaccagtgattctcaaaggcgtcgcagaccattggccatgtatgcagaagtggtcactggaatatattcaagagattgcaggatgcaggaccgtacccgtggaagtgggcagtcgatatacggatgaggagtggtctcaaacactcatgaccgtgaacgaatttatttctaagtatattgtaaacgagccacgggacgtggggtacctggcccagcaccaattgtttgaccagatccccgaattgaagcaggatatcagtattcctgattattgcagtctgggggatggggaagaggaagaaattacgatcaatgcttggttcggaccacagggcacgataagtcccctgcatcaggatccacagcagaatttcctggtacaggtcatgggtaggaagtatatacgactgtactccccgcaggagtcaggagctctttatccccacgacacccacctgctgcacaacacaagccaagtggacgtggaaaaccctgacctggaaaaatttcctaagtttgccaaagcccccttcctcagctgtattctgtctccaggcgaaattctcttcatcccagtcaagtactggcattatgttagggctctcgatctgtccttcagtgtgtctttctggtggagc

SEQ ID NO: 253 - DNA, 1389 bp, synthetic construct
  source 1..1389: mol_type = other DNA
gccaccatgcagtttaatatcgatagcatggtgcacaaacatggcctggaattttatggctacattaaactcatcaactttatcaggctgaagaaccccacagtggaatatatgaattctatttacaatcctgtcccgtgggaaaaggaggaatacctgaagcctgtgcttgaggacgatctgctgttgcagtttgatgtggaagacctgtatgagccagtgtcagtacctttctcctacccaaatggcctctcagagaatacctctgttgtggagaaactcaaacacatggaagcgcgggctctcagtgccgaagctgcccttgctagagccagagaggatctccaaaaaatgaaacagttcgcccaggactttgtcatgcatacagacgttaggacatgtagtagttccacctctgttatcgcagatcttcaggaagatgaagatggagtttatttcagcagctatggacattatggcatccacgaggagatgttgaaggataagattagaacagagtcttaccgggatttcatttaccagaatccacacattttcaaagacaaggtggttctcgatgtaggctgtggaacaggcattctgagtatgtttgcagcaaaagccggcgctaaaaaggttctgggggtggatcaaagcgagatactctatcaggccatggatatcatccggctcaataaactcgaggatacaattaccttgataaagggtaaaattgaggaagtgcatctgcccgttgaaaaagtggacgtgatcatctcagagtggatggggtacttcctcctttttgaatctatgcttgacagtgtgctgtacgccaaaaataagtacctggccaagggaggtagcgtttacccagacatttgtacaatctctctggtggctgtgagtgacgtcaacaagcatgcggatcggatcgccttctgggacgacgtgtacgggtttaagatgtcatgcatgaagaaagcagtcattcccgaagcggtggtggaagtactcgatcctaaaacgcttattagtgaaccttgcgggataaaacatatagactgtcacactacatctatctctgacctcgagttcagttccgactttacccttaaaattacaaggacgagtatgtgcacagcaatcgcaggatactttgatatttatttcgagaaaaattgccataaccgcgtcgtgttctcaacaggaccccaatctaccaagacgcattggaaacaaaccgtcttccttctcgaaaaaccttttagtgttaaagctggcgaggcgctcaagggtaaggttaccgtgcacaaaaataaaaaagacccccgctccctgacagtgacgctgacgctcaacaactcaactcagacatatggtcttcag

SEQ ID NO: 254 - DNA, 1173 bp, synthetic construct
  source 1..1173: mol_type = other DNA
gccaccatggccgaacctgatccctctcaccccctcgaaacccaggccggcaaagtgcaggaagcccaggactccgatagcgactctgaaggaggtgcagccgggggcgaggccgatatggattttcttcgcaatctgtttagccagaccctgtccctgggtagccagaaagagagattgctcgatgaactgaccctcgaaggcgtcgcacggtacatgcaatctgagcgatgccggcgcgtgatctgcctggtcggagccgggatcagcacaagcgccggcatccccgattttcgcagcccgagtacaggcctgtacgacaatctcgagaagtaccatctgccttatcccgaggctatattcgaaatcagttactttaaaaaacatccggagcccttcttcgctttggctaaggagctttaccccggacaattcaagcctaccatctgccactatttcatgcgactgcttaaggacaagggtttgctgcttaggtgctacacccagaatatcgatacactcgagagaatcgccggcctggaacaagaggacctggtcgaagcacatgggacgttttacactagccactgcgtctccgctagctgcagacacgagtaccctttgtcctggatgaaggagaaaattttctccgaagtgacacccaaatgtgaagattgccagtccctggtgaagccggacatcgtattctttggcgaatccctgcctgctcggttttttagttgtatgcagtctgattttttgaaggtggatcttctgctggtgatgggaacttcccttcaggttcagcctttcgcaagcctgatttcaaaggctcccttgtcaacaccccggcttctgatcaacaaagagaaggcaggccaaagtgatccattccttggcatgattatggggctgggaggtggcatggacttcgatagtaagaaagcttacagagatgtggcttggctgggcgagtgtgaccaggggtgcctggcactggctgagctgctgggatggaagaaggaactggaagatctggtgagaagggaacacgcatccatcgacgcccagagtggtgctggagtgcctaatccatctacttcagcgagccctaagaaaagccccccccctgcaaaagacgaagctcgaacaactgagcgcgagaaacctcaa

SEQ ID NO: 255 - DNA, 2223 bp, synthetic construct
  source 1..2223: mol_type = other DNA
gccaccatgtcagaggctgggggtgcaggacctgggggatgtggcgcaggagctggagctggagctggccctggagccctccccccccagccagcagcacttcctcccgctccacctcagggatcaccctgcgcagctgctgctggtggctcaggcgcctgcggacctgccacagccgtggccgccgcaggtaccgctgaagggccagggggcggagggtctgctcggatcgccgtgaagaaggcgcaactgaggtccgcccctagggcaaagaagcttgagaaactgggcgtttactcagcctgcaaagccgaggagagctgtaagtgcaacgggtggaagaatcccaacccctcaccaacacctcctcgcgcggatttgcagcagatcatcgtatcactgactgagtcatgccgatcatgcagccacgccttggctgcacatgtgtcccacctcgagaacgttagtgaggaggagatgaatcgactcctcggaattgtcctggacgttgagtatctgtttacatgtgtgcacaaagaggaagatgctgacactaagcaggtttacttctatctcttcaaacttctgcggaagagcatccttcagcgagggaagccggtggtggagggctcccttgagaaaaaaccaccttttgagaagccaagcattgaacagggggtgaataatttcgtacagtacaagttctcccacctgccggccaaagaacggcaaacaattgtcgaactggccaaaatgtttctcaatagaattaactactggcaccttgaagcacccagtcagagaaggctgcgcagcccaaacgacgatattagtggctacaaggaaaattacacccggtggctgtgctattgcaacgtgccacagttctgcgactctctgcccagatatgaaaccacacaggtttttggtcgcacccttttgcggagcgttttcaccgttatgcggcgccagctgctggagcaggcgcgacaggagaaagataaactgcctctggaaaagagaacactgatccttacacattttccaaagttcctctcaatgctcgaggaggaagtatatagtcagaatagccccatctgggaccaggacttcctgtctgctagttctcgcacttcccagctgggcattcagacagtaatcaacccacctccagttgctggaactatcagttataatagcacgtcctcatctctggagcagcccaatgctggtagctcttcacccgcttgcaaggcctcatccggcctcgaggctaatcctggagagaagcggaagatgactgattcccatgtgctggaagaagctaaaaagccaagggtcatgggagatataccaatggagctgattaacgaagtcatgtccacaattaccgatcccgctgcaatgttgggtcccgaaaccaattttctgagcgcccactctgcccgagacgaagccgcccgcctcgaagagcgcaggggtgtgatcgagtttcacgtcgtggggaacagtctgaaccaaaagcctaataagaagattctgatgtggcttgtggggctgcagaacgtttttagccaccaactgccccgcatgcctaaagagtatatcacccgccttgtgttcgaccccaaacacaagacactcgctttgatcaaggacggcagggttatcggcggcatttgcttcagaatgtttccctcccaaggttttaccgagatcgttttttgcgcggtcacctcaaacgaacaggtgaagggttacggaacacaccttatgaatcatctgaaggaataccacatcaagcacgatattctgaactttttgacttatgctgatgaatacgccattggttactttaaaaaacagggctttagcaaggaaattaagatccccaagaccaaatatgtggggtacataaaagattatgaaggcgcaacattgatgggctgtgagctgaaccctagaattccttataccgagttcagtgtaatcataaagaaacaaaaagaaatcatcaagaaacttattgaaaggaaacaggcccagattcgcaaggtgtatcccgggctgtcctgttttaaagatggcgtgagacagatcccaatcgagagtatacccgggattagggaaacaggttggaagccgagtggcaaagaaaagagcaaagagcctcgggatcccgaccagctgtacagcactctgaaatcaattctccagcaagta

SEQ ID NO: 256 - DNA, 1941 bp, synthetic construct
  source 1..1941: mol_type = other DNA
gccaccatgcccgctcgcaccgcaccagcacgcgttccaactctggcggtgccagctatatccttgccagatgatgtgcggcgcaggcttaaagatctggaacgagattccctgactgagaaggagtgtgtgaaggagaaactgaatcttcttcatgagttcctgcagaccgaaatcaagaatcaactgtgtgatctggaaaccaagctcagaaaggaagagctgagcgaggaggggtatttggctaaagtaaaatcccttctgaataaggacctgagcctggagaacggggcccacgcgtacaatcgcgaggtgaatggtcggctggagaacggaaatcaggccaggtcagaggctcggcgcgtcggtatggctgatgcaaattctcctcctaagcccctgtccaaacctcgcaccccccgacggtcaaaatccgatggcgaggccaaacctgaaccatcaccaagcccaagaatcactagaaaatctacccgccagaccaccatcacctcacatttcgccaaagggccggccaagagaaagcctcaggaggaaagtgagagggccaagtctgacgagtccattaaagaggaggacaaagatcaggacgaaaagcggagacgagtgacatccagagagcgggttgccagacccctccccgcagaggagcctgagagagctaagtctggaacacgcacggagaaggaagaagagagggatgaaaaggaggaaaaacgcctccgatcccaaactaaggagcccaccccaaagcagaagttgaaagaagaaccagatcgcgaagcacgggctggggtccaggcggatgaagatgaagacggcgacgaaaaagacgaaaagaaacaccggagccagcctaaagatctcgcggccaagcggagacccgaagaaaaggagcctgagaaggttaatccacaaatctccgacgagaaggacgaagatgaaaaggaggaaaagagaagaaagaccacaccaaaggaaccgacggagaaaaaaatggcacgcgcaaagacagtgatgaactctaaaacccaccccccaaagtgcatacaatgtggtcagtacttggacgatccagacctgaagtacgggcagcaccctccagacgcggttgatgagcctcagatgctcaccaatgaaaagctgtccatttttgatgctaatgagagcggttttgagtcatatgaagccttgccccagcataagttgacatgcttttctgtgtattgcaagcacggccacttgtgccctatcgacacaggcctgattgagaagaatattgagctgtttttcagtgggtccgccaaacccatctacgacgacgacccctcactggagggcggcgtgaatgggaagaacctgggccccatcaatgaatggtggattactggctttgatggtggcgagaaagccttgatcggttttagcacctctttcgcagagtacattctgatggacccaagccccgagtatgccccaattttcggcctgatgcaagagaagatctatataagtaagatagtggtggaatttctgcagtcaaattccgacagcacatatgaagacctgataaacaagatcgaaacaacagtccctccctccggtctgaaccttaatagatttaccgaggacagcctgctccggcatgcccagttcgtcgtggagcaggtcgaaagctacgacgaggccggtgacagcgacgagcagcctatattcctcacaccctgcatgcgggatctcataaagctggccggtgtcaccctggggcaacggagggctcaggccagaaggcagaccatcagacactccacccgcgaaaaggaccggggcccaacaaaggcaacaacgacaaaactggtctatcaaatctttgataccttttttgccgagcagatcgagaaggatgatcgcgaggacaaagag

SEQ ID NO: 257 - DNA, 2781 bp, synthetic construct
  source 1..2781: mol_type = other DNA
gccaccatgaacatggcaatgaaagaagccgatgacgatgaggaggtggacgacaacatccccgagatgccctccccaaagaagatgcaccaaggaaagaagaagaagcagaataaaaatagaatctcatgggtgggagaagcggttaaaactgatggcaagaagagctattacaaaaaggtgtgtatcgacgccgaaaccttggaagtgggggattgcgtgtccgtgattcccgatgactcctccaaacctctctatctggccagagttaccgctttgtgggaggattctagtaatggtcaaatgttccacgcccattggttttgcgctggtaccgacacagttctgggggccacaagcgaccccctggagctgtttctggtagacgaatgcgaagacatgcagctctcctacatccacagcaaggtgaaggtcatttacaaagcgccgtctgagaactgggcaatggaaggaggaatggatcccgaatcccttcttgaaggtgacgatggcaagacctacttttatcagctgtggtacgaccaggattatgccaggtttgagtcccccccaaaaactcaacctactgaagataataagtttaaattttgtgtgtcatgtgcccgacttgctgagatgagacaaaaggaaatccctcgcgtactggaacagctggaggatctcgacagccgagtgctgtactacagcgcaaccaagaatggaatcctgtacagagtgggcgacggcgtgtacctgccacctgaggctttcacctttaatattaaattgtcaagtcctgtgaagagacccaggaaggaaccggtcgacgaggacctgtaccccgagcattaccgcaaatacagtgactacatcaaggggagcaacttggacgcacctgagccctatagaatcggcagaattaaagagatcttttgccctaagaagtctaacggtaggcctaatgaaacagatataaagatccgcgtcaacaaattctaccgccccgaaaacacacataaatcaacaccagctagctatcacgccgacattaatctgctgtactggagcgatgaggaagccgtcgtagactttaaagcagtgcaaggtcggtgtacagtagaatatggagaggatctgccggagtgtgtgcaggtgtactctatgggcggcccaaatcggttctattttttggaagcgtacaacgctaagtccaaaagcttcgaggatcccccaaatcacgccaggtcccctggaaacaagggaaaaggtaaaggtaagggcaaggggaaaccaaaatcacaggcctgtgagccgagtgaaccagaaatagaaatcaaactccccaagctgagaaccttggatgtgtttagcggttgtggaggcctttctgaaggcttccaccaggccggaattagtgacaccctctgggccatagagatgtgggaccccgctgctcaagcctttaggctgaacaaccccggaagtaccgtttttaccgaggattgcaacattcttttgaaactcgtaatggccggcgaaacaaccaactcaagggggcaaaggctgccacaaaagggggacgtggagatgctgtgcgggggaccgccatgccaaggtttttcaggtatgaatcggttcaatagtcggacctactctaaattcaagaatagcctggttgtgtccttcctgagttattgcgattactaccgacctaggttcttcctgctcgaaaacgtcagaaacttcgtgagcttcaagagatcaatggtgctgaaactgacactgaggtgcctcgtccgcatggggtatcaatgcacgtttggtgtactccaggcgggtcagtatggagttgcccaaacgcggaggagggctatcattctcgctgctgcccctggcgagaaattgcccctgttccccgagcccctgcatgtcttcgctcctagggcctgtcagttgtcagtggttgtggacgataaaaagtttgtgagtaatattaccaggctgagctctgggccattccgaaccatcacagtgcgagatactatgagtgacttgccggaagtgcgaaatggcgcaagtgccctcgagatcagctacaatggcgagccacaaagctggtttcagcggcagctgcggggcgcacagtaccagcccatacttagggaccatatctgtaaggatatgagtgcacttgtggccgctaggatgaggcatatccccctcgcacctggatctgactggagggatttgccgaacattgaggtgaggttgagcgatggtacaatggctcgaaagctccggtacacacatcatgatcgcaaaaatgggagaagtagttctggggctctgcgcggagtgtgcagttgtgtcgaagccggtaaggcatgcgacccagctgcaagacagttcaacacactgattccttggtgtctgccccatactggcaaccggcacaaccactgggccggactttacggacgcctcgagtgggacggatttttttccactaccgtcacaaacccggagccaatgggtaaacaaggacgcgtactccatccagagcagcatcgggtggtgtccgtgagagagtgtgccagaagccagggcttccccgacacttaccgcttgtttggaaacatactggacaaacacaggcaagttggcaatgctgtgccaccccccctggcgaaagccattggacttgaaatcaagctctgcatgctcgccaaggcgcgagagagtgcctccgctaagattaaggaggaggaggctgctaaggat

SEQ ID NO: 258 - DNA, 543 bp, synthetic construct
  source 1..543: mol_type = other DNA
gccaccatgagcgacggcctgagagcagaagacggtttcgaggaccagatcctgatcccagtccctgcaccagctggaggcgatgatgattacatcgagcagaccctcgttaccgtggctgccgctggaaaatccggtggaggagggagcagcagctccggagggggacgggtcaaaaaaggagggggtaaaaagtctggaaagaagtcctatcttagtggcggcgctggcgccgctggtggtggcggggctgatcccggtaataaaaagtgggagcagaagcaagttcagataaagacccttgagggagagttctctgtgaccatgtggagctccgatgagaaaaaggatatcgaccacgagacagtggttgaagagcaaatcatcggcgaaaacagccctccagactactcagagtacatgacgggcaaaaaactccccccaggcggtattcccgggatcgacctctccgaccccaaacagctcgccgagttcgcacggatgaaaccgcgcaagatcaaagaagatgatgcgccacggact

SEQ ID NO: 259 - DNA, 423 bp, synthetic construct
  source 1..423: mol_type = other DNA
gccaccatgctccggacaagcactaagagaaaacaggccgacattaccagttccagctcctccgatattgaggatgacgaccagaattccataggcgagggcagcagcgacgagcagaagatcaagcctgtgactgaaaacttggtgttgtcaagccacactggcttctgtcaatcaagcggcgatgaagctctgtctaagtctgtccccgtgactgtcgacgacgatgacgatgacaatgatcctgagaacagaatcgcgaagaaaatgttgctggaggaaatcaaagctaacctgagttctgacgaagatgggtcctctgatgacgagccggaggaagggaaaaagcggacgggcaaacaaaatgaagaaaaccccggcgacgaagaggccaagaaccaagtaaacagcgagtcagacagc

SEQ ID NO: 260 - DNA, 2745 bp, synthetic construct
  source 1..2745: mol_type = other DNA
gccaccatgaagaccaagaagagccctggctccggatgtatcttggctcattgcatgggccttgggaagacccttcaggttgttagctttctgcataccgtgctcttgtgcgataaactggattttagtacagctcttgtcgtgtgccctctcaataccgcccttaattggatgaatgagtttgagaaatggcaggagggtcttaaggacgatgaaaaactggaggtgtccgagctcgcaacagtcaaacggcctcaagagcggagttatatgttgcaaagatggcaggaggatggcggggtaatgataatcggctatgagatgtatcggaatctcgcgcagggccgcaatgtgaaaagcagaaagctcaaggaaatctttaacaaggccctggtggatcccggccctgacttcgtcgtctgcgatgaaggacacattttgaaaaatgaagcttctgccgtgtcaaaagcaatgaatagcatccgctctcggcgcaggattatcctgaccggtaccccccttcagaacaatctgattgaataccactgtatggtcaatttcattaaggagaacctgcttggatctattaaagagttcaggaataggttcatcaacccaatccaaaatggccagtgcgcagactccacaatggtcgacgtccgcgtgatgaagaaacgggctcacatcctgtacgagatgcttgccggatgcgtccagcgcaaagactacaccgccctcacaaagtttcttccacctaaacacgagtacgtgttggccgttaggatgacgagcatacagtgtaaactttaccaatactaccttgaccatctcaccggggtaggaaacaattctgagggggggcggggtaaagcaggcgcaaagctcttccaagatttccagatgctgtctcgcatctggacccacccttggtgtttgcagctggactacatttccaaagaaaataaaggttactttgacgaggactcaatggacgaattcatagcatctgatagcgacgagacctcaatgtccctttccagcgacgattatacaaagaagaaaaagaagggtaagaagggtaaaaaagacagttcatcctccggatctggaagcgacaatgacgtggaggtaatcaaagtttggaacagcaggtctcgaggcggtggcgagggcaatgtggacgagactgggaacaacccttctgtgagtctgaaactggaggaatcaaaagctacgagttcctctaacccgtcctcaccagctccagactggtacaaggactttgtgaccgatgctgacgccgaagttctggagcattctggaaaaatggttttgctcttcgagatcctccgcatggctgaggagattggggacaaggtcctcgtgttcagccaaagtcttatctcactggacctgatcgaggattttctggagctcgcgagcagggagaaaactgaggacaaagacaagccactcatttataaaggagagggaaaatggctccgcaatatcgattactaccggcttgacggctccaccacagctcagtccagaaaaaagtgggcagaggagttcaacgatgaaactaacgtgcgagggcggttgtttatcatcagcacgaaggccggcagcctcgggatcaacctcgtggcagccaatcgcgtgattatctttgatgcctcctggaatcccagctatgatatccagagcatctttagggtttatcgcttcggccagacaaagcctgtgtacgtgtatcggtttctcgcacaagggacgatggaggataagatctatgacagacaggtgaccaaacagtcactgtctttcagagttgtggatcagcaacaggtcgaacgccactttaccatgaacgagctgactgaattgtacacattcgagcccgatctcctggacgacccaaatagcgagaaaaagaaaaagagggacacccctatgcttccaaaggacactatactggccgagctgcttcaaatccataaagagcacattgttggctaccatgaacatgacagtctgctggatcataaggaagaggaggaactcacagaggaagagcgcaaagcagcttgggcagagtacgaagccgagaagaagggcctcactatgagattcaatatcccgactggaaccaacctgccaccagtgagttttaatagccagactccctacatcccttttaacctgggcgcgttgagcgcaatgtcaaatcaacagctggaagacctcatcaatcagggcagggaaaaagtcgtcgaggccacaaattccgtgacagccgttcgcatccagccgcttgaggatataatatccgccgtttggaaggagaacatgaatttgagcgaagctcaggtgcaggcacttgcactgtcacggcaggcgtcacaggagctggacgtgaagagaagagaggccatctataacgacgtacttacgaaacaacagatgttgattagttgcgtgcaaagaattctgatgaacaggagactgcagcaacaatacaatcaacagcagcagcaacagatgacataccagcaggctactctgggacacttgatgatgccaaaaccccctaatctgattatgaatccctccaactatcagcagatcgacatgagaggaatgtatcagccagtggcaggcggcatgcagccacctcccctccagcgggccccacctcccatgaggtccaagaacccagggccatcccagggtaagtccatg

SEQ ID NO: 261 - DNA, 1665 bp, synthetic construct
  source 1..1665: mol_type = other DNA
gccaccatggcagctgtctctctccgcctgggtgatctggtgtgggggaagctgggaaggtaccccccgtggcctgggaagatagtgaaccctccaaaagacctgaaaaagccaagaggtaagaagtgttttttcgtgaaattctttggcacagaagaccacgcgtggatcaaagtagaacaactgaagccttaccatgctcacaaagaagagatgattaagatcaacaaaggcaagaggttccagcaagccgtggatgccgtggaagagttccttcgacgagcaaaagggaaggatcagacatcttcccacaacagctccgacgacaaaaaccgacgcaactctagcgaggagcgctcacggccaaactccggggacgagaagaggaagctttcactgtctgaggggaaggttaaaaaaaacatgggagaagggaaaaagagggtttcctctggctcaagtgagagaggctccaagtcacccttgaaaagagcccaggagcagtctccacgcaagaggggaaggcccccaaaagatgagaaagatctgacaatccccgaaagcagcacagttaagggaatgatggccggccctatggctgccttcaagtggcaaccaacggcatccgagccagttaaagatgccgatccccacttccaccactttctcctctcccagacagaaaagcccgcagtttgttaccaggctattaccaagaagctgaaaatctgcgaagaggaaaccggctcaacttcaattcaggccgcagactctactgcagtcaacggttcaatcacaccaacagacaaaaaaattgggttcctgggcctgggccttatggggtccgggatagtgtccaatttgcttaagatgggccacaccgttacggtttggaacaggacagcggagaaatgcgatctcttcatccaggaaggggcaagacttgggaggacaccagcagaagtcgtaagcacttgcgatataaccttcgcctgcgtgtcagatccaaaggcggctaaggacctcgtactgggcccctccggcgtactgcagggcatacgaccgggcaaatgctacgttgacatgagcacggtggacgccgacactgtcaccgaactggcccaggtgatagtaagccgaggcgggagattcctggaagcccctgtgagcggaaaccaacagctgtcaaatgacggtatgttggttatcctcgctgccggggaccgggggctctatgaagactgcagcagctgctttcaggcaatgggaaaaacctcattcttcctcggggaggtggggaatgctgctaaaatgatgctcattgtgaacatggtccagggtagcttcatggccacgatcgccgaggggctcacgctggcacaggtgaccggacagagtcagcaaacactgctggatatcctgaaccaggggcaactcgcctcaatctttttggaccagaaatgtcaaaacattctgcaggggaatttcaaacccgacttttatctgaagtatatccaaaaggatctgaggctggcaatagctctgggagacgccgtgaatcatccaactccaatggctgctgctgccaacgaagtctataaaagagctaaagctctcgatcagtctgataatgacatgtcagcagtctacagggcatacattcat

SEQ ID NO: 262 - DNA, 879 bp, synthetic construct
  source 1..879: mol_type = other DNA
gccaccatggaagaagggcctcttcctgggggtctgccctctcccgaagacgctatggttaccgaactgctgtctccggaggggccatttgcgagcgagaatatcgggctgaaggctcccgtaaaatatgaagaagatgaattccacgtgtttaaagaagcatatttggggcccgctgatcctaaagaaccagtcttgcacgcctttaaccctgcactgggcgccgattgtaaggggcaagtgaaagccaagctggccggcggcgattccgatgggggcgagctgttgggcgagtaccccggtatccccgagctcagcgctttggaagatgtggctctgctgcaggcccctcaaccccccgcctgtaatgtgcacttcctgagttccctgcttcctgcccatcggtccccagctgtgctgcccctgggagcttgggtgctggagggcgcctctcatcccggagttaggatgatcccagtagagatcaaggaagctggagggactacgaccagcaacaacccagaagaggctacactccagaacctgctggcacaggaatcatgttgcaaattccctagttctcaggagctggaggatgcctcttgttgttccctgaaaaaggatagcaaccctatggtaatctgccagctgaagggaggcacacagatgttgtgcatcgataatagccggacccgggagctgaaagctctccatctggtaccccagtatcaggaccagaataactacctccagtccgacgttccaaaacccatgactgccctcgtcggtaggttcctcccggcatcaaccaaattgaatctcattacccaacagctcgagggagctctgccttctgtggtgaatggatcagccttccca

SEQ ID NO: 263 - DNA, 1095 bp, synthetic construct
  source 1..1095: mol_type = other DNA
gccaccatggcaagcgctgtttctcccgctaacctgccagccgtgctcttgcagcctagatggaaacgggttgtgggctggtctgggccggtcccccgcccacgccatggccatagggctgtcgcgatcaaggaactcattgtggttttcggcggcggcaatgagggcatagttgatgagctgcacgtgtataacaccgccacaaatcaatggtttattccggcagtgaggggcgacatacccccgggctgcgctgcatacgggttcgtgtgcgacggcacaagactcctggtgtttggggggatggtcgagtacggaaagtactctaacgacttgtacgaactccaggctagccgctgggaatggaagcgcttgaaggcaaaaacacctaagaacggaccacctccttgcccccgactgggccacagtttctccttggtgggcaacaagtgctacctctttggcggtctggccaacgacagcgaggaccccaaaaacaatattccccgatacctgaatgacctttatattctcgagctgagacctggtagtggtgtagttgcgtgggacattcccataacctacggcgtgctgccccctcccagagagtctcatacagccgtggtttataccgagaaagataataagaagagtaagctggtgatctatggtggtatgagtggatgccggctgggagacctgtggaccctcgatattgacactctgacatggaacaagccttctttgagcggcgtcgcaccactgccacgcagcttgcactcagccacaacaattggcaacaagatgtacgtgtttggagggtgggtgccactcgtaatggacgacgtcaaagtcgctactcatgagaaagagtggaagtgtactaacacactggcctgcctgaaccttgatacaatggcttgggagaccatcctgatggacacactggaggacaacatccccagagccagagcaggacattgcgctgttgccattaacacgcgcctgtatatctggagcggcagggatgggtatagaaaagcctggaacaaccaggtttgctgcaaagacctgtggtacctggagacagagaag

SEQ ID NO: 264 - DNA, 1971 bp, synthetic construct
  source 1..1971: mol_type = other DNA
gccaccatgcctcccgccagggtccagctggtcagagcaaatactaactcccttgaagtttcatggggcgccgtggctactgctgatagctaccttctgcagttgcagaaatacgacattcccgcgacagccgcgacagcgacatctcccactccaaaccctgttccatcagtgcccgctaacccccctaaatcccctgccccagcagctgccgcacccgcggtgcaacctttgacacaagtcggaatcaccctgctcccacaagccgccccagcccctcccacaactacaacgattcaagtgctgccaactgttcctgggtcctccatctcagtgcccacggctgcccgcacccagggcgtcccagcagtgctgaaggtgacgggcccacaggccaccacaggtacaccactggttaccatgaggcctgcctcacaggctgggaaggctcccgtgactgtgacttcactgcctgcaggcgtgcggatggtggtgccaactcagtcagcacaggggaccgtgatcggatcatccccacaaatgagtgggatggccgcattggccgccgccgcagctgcaactcagaagatacccccttctagcgctccaaccgttctgtctgttccagctggaacaactatcgtgaagaccatggcagtcacacctggcaccaccacattgccagccaccgtcaaggtagcttctagccctgtcatggtaagcaaccccgccacaaggatgctgaaaacggcagccgcacaggtggggacctcagtgagtagtgctacaaacacttctacgcgacccattattaccgtccacaagtccggaactgtgactgtggcccaacaggctcaagtagtgacgactgtggtggggggagtcaccaagaccataactctcgtgaagtccccaatctctgtgcccggcggcagtgcactcatctcaaatttgggtaaagtcatgagcgtggttcagactaagcccgtgcagacgagcgctgttacgggacaggcttccacaggtcctgtgacacaaatcatccagaccaaaggacctctgcctgccggtacaatccttaaattggtgacctcagccgatggaaaacctactaccatcattacgacaacacaggcttccggagctggcaccaaacccacgattttgggcattagttctgtttctccttctaccaccaagccggggacaaccaccattataaaaacaatccctatgtctgccatcatcacccaggctggcgctaccggggtcaccagttcccctgggatcaagtcccctatcacaattattaccacgaaggtgatgacaagtgggacaggggcccccgctaaaataatcaccgcagtccccaagatcgcaaccggacatggtcagcagggcgtgacgcaggtggtcctgaaaggtgcgccaggacagcctggaactatactgagaaccgtgccaatggggggggtgcggcttgtaaccccagtcaccgtaagtgcggtgaaaccggcagtgaccactctcgtcgtcaagggaaccaccggcgtaacgactctcggtaccgtcacaggcactgtctccactagcctggccggagctgggggacattctacaagcgcgagcttggcgacacccattacaaccctgggaaccatcgccactctgtcctcccaggtgatcaaccccactgccattaccgtgtccgcagctcagactaccctgactgccgcaggtggactgacaactcccactattactatgcagccggtcagccaacccacacaggtgaccctgataacggcacccagtggtgtcgaggcacagccagtccacgatctgcccgtcagcatcttggccagccctacaacagagcagcctacagcgacagttactatcgccgactctggccagggcgacgtccagcctggaacagttactcttgtgtgttccaaccccccctgcgag

SEQ ID NO: 265 - DNA, 1845 bp, synthetic construct
  source 1..1845: mol_type = other DNA
gccaccatgacccacgagactggaactacgcacactgcaacaacagtgacctcaaacatgtcaagcaatcaggacccacctccagcagcatccgaccagggcgaagtcgagtccacccagggagatagcgtcaatatcacgtctagttccgcgatcacaacgaccgtgtcttccactctgacacgggctgtgacaacagtgacacagtcaactccagtccccgggccctctgttcctccgcctgaggaactgcaggtgtctccaggcccaaggcagcagcttccccctcgccagctgctgcagtctgcatctaccgccctcatgggtgagtctgccgaagttcttagcgcgtcccagacccctgagctcccggctgctgtggatctctcttccacaggggagccatcctctggacaggagtcagccggctctgccgtagtggcaacagtggtcgttcaacctccgccaccaacgcagagcgaagtcgatcagttgtctcttcctcaggaactgatggccgaggcccaggcaggcacaacaactctgatggtcactggcctcactccagaagaactggcagtgacagctgccgctgaggccgcagctcaggcagccgcaacagaggaggcccaggcactggccatccaggccgtcctgcaggcagctcagcaagcagtcatgggcaccggagaaccaatggacaccagtgaagccgcagctacggtgacacaggccgaactgggtcatctttctgcggagggtcaagaaggccaggccactaccattcccatcgttctgacacagcaggagctggccgcattggtccagcagcagcaacttcaagaggcccaagcccaacagcagcaccatcacttgcctaccgaagcccttgctccggccgattctctcaatgacccggccatcgagtccaactgtctgaacgagctcgcaggtactgtaccatctaccgtggcactgctgcctagtactgcaacggaatctttggcaccgagtaacacattcgtggcaccccagccagtcgtcgtggcatcccctgctaaattgcaggccgccgcaacactcacagaggtcgctaatgggatcgaaagtctgggggtcaagcctgacttgccaccgcccccctctaaggcgcccatgaaaaaagagaaccaatggttcgacgttggagtgatcaagggcactaacgtgatggtcacgcattacttcctcccccctgacgatgccgtgcccagtgacgacgacctggggactgtgcccgactataatcaactcaaaaaacaggagctgcaacccggcactgcgtataagtttcgggtggccgggatcaatgcttgcggaagagggccctttagcgagatcagtgcttttaaaacatgccttccgggctttcctggagcaccgtgtgccatcaaaatatctaagagccccgacggcgcacatctgacctgggagccccccagcgtcactagtggtaagatcatcgagtactctgtatacctggccatacagagcagtcaagctggtggggaactgaaatcctcaactccagcccagcttgcttttatgcgcgtgtattgtggtccatcaccaagttgcctcgttcagtcatctagtctctccaacgcccacatcgattacactaccaaaccagccatcatctttaggatcgccgccaggaatgaaaagggctacggcccagccacccaggtcagatggctgcaggagacaagcaaggacagttcaggaacaaagccagccaacaagagacccatgagcagtcctgagatgaagagcgctcctaaaaaatccaaggcggatgggcaa

SEQ ID NO: 266 - DNA, 1620 bp, synthetic construct
  source 1..1620: mol_type = other DNA
gccaccatgaacctggagttgcttgagtccttcgggcaaaattacccagaggaggccgatggcacacttgactgtatttcaatggccctgacctgcaccttcaaccgatggggcaccctcttggccgttggatgtaatgacggtaggatcgttatctgggattttcttacccgcgggattgccaaaataatctccgcgcacattcatcctgtgtgcagcctgtgttggtccagggatgggcacaaactggtatccgccagtaccgacaatatcgtatctcaatgggatgtgctctccggtgattgcgaccagcggtttcggttccccagcccaatcctcaaagtgcagtaccaccccagagaccagaataaagttcttgtgtgccccatgaagtccgctcctgtcatgctcacgttgagcgactctaagcacgtggttctgccagtggacgatgattcagatctgaacgttgtggcctctttcgaccgacgcggagaatatatttatactggaaatgccaaagggaaaatcctggtgctcaagaccgacagtcaggaccttgtcgcaagcttcagggttactacgggcacaagtaatacaactgccatcaagagcatcgagtttgccaggaaagggtcctgttttttgatcaataccgcagaccgaatcattagggtctacgacggaagagaaatcctgacatgtgggcgcgacggcgaacctgagcctatgcagaagctgcaggacctggtcaacaggacaccttggaagaagtgttgttttagcggtgatggggagtatatcgtagctggcagcgcaagacagcatgcgctgtacatctgggaaaagtcaatagggaatcttgtgaagatactccatgggactagaggcgagcttttgctggatgtggcctggcatcctgtgaggcctatcattgccagtattagctccggtgtagtgtccatatgggcccagaaccaagtggagaattggtccgccttcgcacctgatttcaaagagctggatgaaaacgttgagtatgaagagcgcgagagcgagttcgatatcgaggacgaggataaatcagagcctgagcagaccggggccgatgccgcagaggatgaagaagtggatgttacctctgtggatcctattgctgctttttgttcatctgacgaggagctggaagactcaaaggccctgctgtatctccctattgcacctgaggtggaggaccccgaagaaaacccatatggcccgccacccgacgctgtacaaacgagtctcatggatgagggcgcctccagtgagaaaaaaaggcaaagcagtgctgacggcagccagccacccaaaaaaaagcctaagacaacgaacattgaattgcagggggtgcccaatgacgaggtgcatccccttctgggcgtaaaaggagatggcaaaagtaagaaaaaacaggcaggtcgccctaaagggtccaagggcaaagaaaaggactctcccttcaaacctaagttgtataaaggtgacagaggccttcctctcgaagggtccgccaagggtaaggtgcaggccgaactttcccaaccgctcaccgctgggggggctatctctgaactcctc

SEQ ID NO: 267 - DNA, 1851 bp, synthetic construct
  source 1..1851: mol_type = other DNA
gccaccatgggcctcaaagcagcacaaaaaactctcttcccactccgatcaatcgatgacgtcgttagactcttcgctgccgaactcggtagagaagagccagacctcgtgctgcttagcctcgttctgggatttgtcgagcacttcctggcagtcaatagagtgattcctacgaatgtccccgaacttacatttcagcccagcccagctcctgatcccccaggaggtttgacttactttccagtggctgacttgagcatcattgcagcactgtatgccaggtttacagctcagattcgcggggccgttgacttgtctttgtaccccagggagggcggagtgagttcccgagaacttgtgaaaaaggtctcagacgtgatttggaacagtctgtcaaggtcatatttcaaagaccgcgcacacatccagagcctgttctcattcataacaggctggtctcctgtaggcacgaaactggacagcagcggggtggcttttgccgtggtcggcgcctgccaagctcttgggctgagagacgtgcacctcgccctctctgaggaccacgcatgggtggtgttcggaccaaatggggagcaaaccgcagaagtgacgtggcacggaaaagggaacgaggatcgacgcggccagactgtcaatgctggggtggctgaaaggtcttggctgtatcttaaaggttcatatatgaggtgtgaccggaaaatggaggtcgctttcatggtgtgtgccattaacccgagtatcgatctgcataccgactccctggagttgctgcagctgcagcaaaagctgctttggcttctctacgaccttgggcatctggagagatacccaatggccttggggaacctggccgatttggaggagctggagcccactcccggaaggcccgaccctctcaccctgtatcataaggggatcgcctccgccaagacttactatcgcgacgagcacatctatccgtatatgtatctggctggctaccactgtcgcaacaggaatgtgagagaagcgctccaggcatgggctgatacggcaacagtaatccaggattataattactgtcgagaggatgaagagatttacaaagaattctttgaggtagccaatgacgtgattcccaatcttctgaaggaggccgcctccctgctggaagccggggaagagcggcccggagagcagtctcaggggacccagagccagggctctgccctgcaagacccagaatgttttgcccatctgctgagattttacgatggaatttgtaaatgggaggaaggcagccccacacctgtgctgcatgtcggctgggccaccttcctggtgcagtcactgggacgattcgaggggcaggtgaggcagaaagtcaggattgtgagtagggaggccgaagctgcagaggctgaggagccctggggagaagaggcacgggaaggaaggaggcgcggccctcgaagggagtccaagcccgaagaaccaccacctcccaagaagcctgcactggacaaaggactgggcaccgggcagggcgctgtctcaggtccccccagaaagcccccaggaaccgtggccggaaccgccaggggtccagaaggtggcagtacagcacaggtccccgcaccaacagctagtccgcctccagagggacccgttctgactttccagagtgaaaagatgaagggtatgaaggaattgctggtggctacgaagatcaacagcagtgcaattaagcttcaactgactgcacagtctcaggtccaaatgaagaagcagaaggtgtccaccccgtcagactatacactgtctttcctgaaacgacagcggaagggtctt

SEQ ID NO: 268 - DNA, 1329 bp, synthetic construct
  source 1..1329: mol_type = other DNA
gccaccatgtccgagagggaagtctctacagctcccgctggcaccgacatgcccgctgctaaaaaacagaagttgtctagcgatgaaaactctaatccagaccttagcggcgatgagaatgacgacgctgtcagcatagaaagcggcactaacaccgaaagacctgatacgcccactaatacccccaatgctcctgggcgcaagagttggggcaagggtaaatggaaatcaaagaaatgtaagtacagtttcaaatgcgtcaatagtcttaaagaggaccacaatcagccattgttcggtgtgcagtttaactggcactctaaggaaggagacccgctggtgtttgctaccgttggatctaacagggtgacactctacgagtgtcactctcagggagagatccgcttgctccaatcttatgttgacgcggatgccgatgaaaacttttacacttgcgcttggacatacgactctaacacgtcccaccccctgctcgctgtggccggtagccgcggaatcattcgcattattaaccctattaccatgcagtgcatcaaacattatgtcggacatggtaatgcaatcaatgagctgaagttccacccacgcgacccaaaccttctcctgagcgtgtccaaggaccacgcattgcgcctgtggaacattcaaacagatactctcgtggccatttttggtggcgttgaagggcatcgcgatgaggttcttagtgcagactacgatttgctgggagagaagattatgtcttgtggaatggatcacagccttaaactgtggcggatcaatagtaaaaggatgatgaatgccatcaaggaatcctatgactacaatccaaataagaccaaccgcccatttattagccagaaaatccattttccggactttagcacccgggacatccatcggaactacgtcgactgcgtccgatggctgggagacctcattctctccaaaagctgcgaaaacgcaattgtttgttggaaaccgggtaaaatggaagatgacattgacaagatcaaaccctctgaatctaatgttaccatattgggtaggttcgattatagccagtgtgatatttggtacatgaggttttccatggacttctggcagaagatgcttgcgcttgggaaccaagtgggcaaactctacgtgtgggatctggaagtggaagacccccataaggctaagtgtacgaccctgacccaccataaatgtggcgccgcgatccgccagacaagcttcagtcgcgactcttcaatccttatcgcagtgtgcgatgatgcgtccatttggcgctgggacaggctgcgg

SEQ ID NO: 269 - DNA, 2562 bp, synthetic construct
  source 1..2562: mol_type = other DNA
gccaccatgctgtccgggaagaaggcagccgccgctgctgccgcagccgcagcagctgcaaccggtactgaagcagggccgggcactgcaggggggtccgagaatggttccgaagttgccgcccagcctgcggggcttagtggtccagccgaggtaggaccaggtgctgtaggggaacgaacacctcgcaaaaaagagcctccacgggcctctccgcccggcggtctggcagagcctcccggttctgccggaccgcaggccggcccaacagtagttcccgggagtgctacaccgatggaaacagggatagccgagacgcccgagggccgacgcaccagtagaagaaagagagccaaagtggagtaccgggagatggacgaatccctggccaatctgagcgaggatgagtactacagcgaggaggagaggaatgccaaagccgagaaggaaaaaaagctccccccccctcccccgcaggcacccccagaggaagaaaacgagagcgagcctgaggaaccctccggagtcgagggtgccgccttccagagcaggctcccacacgatcggatgacatcccaggaggctgcatgcttccctgacatcatctctggaccccagcagacgcaaaaggtctttcttttcatccgcaacaggacactccagctgtggcttgataatcccaagattcagctgacctttgaggcgacactccagcagctggaagccccctataattccgacaccgtgttggtgcaccgagtgcacagctatctggaacggcacggtcttattaactttgggatctataagcgaattaagcctctgccaacgaagaaaaccggcaaggttataatcattgggtctggggtgagcggcctcgccgctgccaggcagttgcaaagctttggcatggacgtgaccctgctcgaagcgcgagaccgcgtcggtggccgagtggcaaccttccgcaagggcaactatgtcgccgacttgggggccatggtggtgacgggactgggagggaatccgatggccgtagtgagtaagcaagtcaatatggaactggcaaaaattaagcagaagtgccctctctatgaggcaaacggtcaagcagttcccaaagagaaagacgaaatggtggagcaggaattcaatcgattgctcgaagcaacatcttatctctctcatcagctcgatttcaacgtcctgaacaataaaccagtctccctgggccaagccctcgaagtcgtaattcagctgcaggagaagcacgtgaaagatgaacagatcgaacactggaagaagatcgtgaaaacccaggaggaactgaaggagctcctgaacaaaatggtgaatttgaaagaaaagatcaaagagctccatcagcagtacaaggaggccagtgaggttaagccaccaagggacatcacagctgaattcctcgtgaaatctaaacatcgagaccttactgccctgtgcaaagagtacgatgagctcgctgagacacagggtaagttggaagaaaagctgcaggaactggaggccaaccccccatctgatgtgtacctttcctcccgggatcggcagatcctggactggcacttcgcaaacctggaattcgcaaacgccacacctttgagtactctctcactgaagcactgggatcaggacgacgacttcgaatttacgggttcccatctcaccgttagaaacggctacagctgtgtccccgtggctcttgccgagggattggatatcaaattgaacactgccgtgcgacaggttcggtacactgctagtggttgtgaagtgatagccgttaatacaaggtcaaccagtcagacttttatctacaaatgtgatgctgtgctttgtaccctgcctttgggtgttctcaagcagcagccaccagctgtacagttcgtgccgccattgcccgaatggaagacatccgcggttcagcggatgggctttggtaatctgaataaagtcgtgctgtgtttcgacagagtcttctgggacccgtcagtaaatctttttggccatgtcggctcaactactgctagtaggggggagttgtttcttttttggaacctgtacaaagcacccatactccttgccctggtagccggggaggcagctggtatcatggagaatatttctgacgacgtgatcgttggccggtgcctggctatcctcaagggtatattcggctctagcgcggtccctcaacccaaagaaacagtggtgtctcgctggagagccgacccctgggcacggggctcttacagttatgtggcagcaggtagttccggtaacgattacgatctgatggctcaacccatcacccccggtcccagtatccccggagctcctcagcccattcccaggctgttttttgccggtgaacatactatccgcaactatccagcaactgtgcacggcgctctgctgagtgggttgcgggaagctggccggatcgctgaccaattcctcggcgccatgtatacactgcccaggcaagcgacaccaggcgtccctgcccaacagagcccttccatg

SEQ ID NO: 270 - DNA, 168 bp, synthetic construct
  source 1..168: mol_type = other DNA
gccaccatgccagccgctgctgctattcagcgccactacaatgacgaggatccggaaaaagagaagaggattaaagagttggagcttctgctgatgtcaactgagaacgaactgaaaggccagcaagtgctcccaacgcagaaccatacttgctcctatccaggatgg

SEQ ID NO: 271 - DNA, 1908 bp, synthetic construct
  source 1..1908: mol_type = other DNA
gccaccatgcagttcaaccctgaagagcttcggacagctctgctccccacactggaaaagctgtatagacaggaacctgagtccgttccgttcaggtaccctgtcgatccccaggcactcggaataccggattactttgaaatcgtcaagaagccaatggatctcggtaccatccgcacaaacatccagaatggcaagtattcagatccttgggagtacgtcgatgacgtctggctgatgttcgataatgcctggctgtacaaccggaagacttctcgcgtctacaggtattgcactaagctttccgaggtttttgaagcagaaatagacccagtgatgcaggcattgggctattgttgcggtagaaaatatacctttaacccccaggttctctgttgctacggtaagcagctgtgcaccattcctcgggacgctaagtactatagttatcagaactcactgaaggagtacggggttgcttcaaataggtacacatactgtcagaaatgtttcaatgatatccaaggcgatacagtcacactcggcgatgaccctctgcagtctcagacccagattaaaaaagaccagtttaaagagatgaagaatgatcatttggagctggaaccgtttgtcaattgtcaagagtgtgggagaaagcagcaccaaatctgtgtactctggcttgactccatctggcccggaggcttcgtatgcgacaactgtcttaagaagaagaactccaagcgaaaggagaataagttcaatgcgaagcggctgcccaccacgaagttgggcgtttatatcgaaacgcgggtgaacaattttctgaaaaaaaaggaggcaggtgcaggcgaggtgcatatccgggttgtgagcagcagcgacaagtgcgtagaggtgaaaccaggcatgcggcggcgcttcgtcgagcagggggagatgatgaatgagtttccttatcgagcgaaggcattgttcgcattcgaggaggtagacgggatagacgtttgcttttttggtatgcatgtgcaggaatacggatccgaatgtccggctccaaatacccggagggtgtacattgcctacctcgacagcgtgcacttcttcagacctcgacagtacaggacagcagtgtaccacgagatcctgttgggatacatggattatgtgaagcagttgggctatacaatggcacatatttgggcatgtccaccgtcagagggagacgactacatttttcattgccaccctaccgatcaaaaaattccaaagccaaagcgactgcaggagtggtataaaaaaatgctggataaggggatgatagaacgaattattcaggattacaaggacatactcaaacaggcaatggaggataagctgggaagtgcagcggaactgccctacttcgaaggggatttctggccaaacgttttggaagaatcaattaaagaactggatcaggaggaggaggagaaaaggaaacaggccgaagcggcagaggcagccgccgcagcaaacctcttcagtatcgaggaaaatgaagtgtccggcgatggaaagaagaagggacagaaaaaagccaaaaaatctaataagtccaaggccgcacagcgaaagaacagcaaaaagtccaacgaacaccagtcaggtaatgacctcagcacgaagatttatgctaccatggagaaacacaaggaggtcttcttcgtgattcggctgcactctgctcaaagtgccgcaagcctggccccaattcaagatcctgatccgctcctcacatgcgacctcatggatggccgcgacgcctttctgactttggctcgggacaagcatttcgaattcagttcactccggcgcgcccagttttccacactctctatgctctacgagctgcacaaccagggtcag

SEQ ID NO: 272 - DNA, 2661 bp, synthetic construct
  source 1..2661: mol_type = other DNA
gccaccatgggggcaggagctattgtgccagtgactcccgtgaaaaagccccggcccaggcctaaggtcgacttggacgacgagaccgacagggtatggaaacttcttctggaaaacatcaattctgagggagtggatggctccgatgagcagaaggctaagtggtgggaggaggagcgcaacgtgttccggggcagagccgattctttcatagccaggatgcatcttgttcaaggcgaccgccgatttacgccttggaagggaagtgtggttgattcagtggttggcgtgttcttgacacagaatgtgtcagatcatctgagctccagcgcttttatgagtctggcctcacagttcccagtgcctttcgtgccttcttcaaattttgatgccggcaccagtagtatgcccagcatccagatcacttacctggattctgaggaaactatgagcagcccgcccgaccacaatcactccagcgtgactctgaaaaacacacagcctgacgaggaaaaagactatgtgccttcaaatgagacttccagaagcagctctgagattgccatatctgcccatgagtctgttgataagaccaccgactccaaggaatacgtggacagcgaccgaaaaggtagctccgtcgaagtggataagaccgatgaaaagtgtcgcgtactgaatctgtttccaagtgaggactcagcccttacctgtcagcatagcatggtatcagatgccccgcaaaacacggaacgggcagggagttcaagcgagattgacctggaaggagagtacaggacttcctttatgaagttgcttcagggggttcaggtttccctggaggattccaatcaggtgagccctaatatgagtccaggcgactgtagcagtgagatcaagggcttccagtctatgaaagagcccaccaagtcttccgtcgattcttctgagcccggctgctgtagccagcaagacggcgatgtactttcatgccaaaagcccaccctgaaagaaaagggtaaaaaggtgctcaaagaggagaaaaaagcatttgactgggactgcctgaggagagaggcccaggccagggccggcatcagagagaagactagatccaccatggacacagtggattggaaagctatcagagctgccgacgtgaaggaagtggcggagactataaagtccagaggcatgaatcacaagctggctgaacgcattcaaggtttcctggatcgattggtaaacgatcacggatccattgacttggaatggctcagggacgtgccgccggacaaggccaaggaataccttttgagcttcaatggcctggggctcaagtccgttgagtgcgtccgcctgctgacactgcatcacctggcgttccctgtggataccaatgtgggaaggatagctgttcgcctgggctgggtgccactgcagcctttgcctgagtccctgcagttgcacttgttggagatgtatccaatgctggagtccattcaaaagtatctctggcccaggttgtgtaagctggatcagaaaaccttgtacgagctccattaccagatgatcacattcgggaaagttttttgtaccaagtcaaagcccaattgtaacgcttgtcccatgaaaggggagtgccggcactttgcttccgcgttcgcttcagccaggctggcactgcccagtactgagaagggaatgggtacaccagataagaatcccctgcccctgcacctccctgaacccttccagagggagcaaggctcagaggtggttcagcatagtgagcccgccaagaaggtgacgtgttgcgagccgataattgaagaacccgcatctccggagcctgaaaccgccgaagtgtccatagcggatatcgaagaggccttcttcgaagaccccgaagaaatccctactattcggcttaatatggatgctttcacttccaacctcaagaaaatcatggagcataataaggagcttcaggacgggaacatgtcctctgccctggtggcgctgaccgcagagaccgctagcctcccaatgccgaaactcaaaaacataagccagctgcgcacagagcacagagtgtatgaactcccagatgaacatccactcttggcccagctcgaaaagagagaacctgacgatccatgttcctaccttttggcgatctggactccaggcgagactgccgattctatccagccttccgtgtccacctgcatctttcaagctaacgggatgctctgtgatgaagaaacttgtttctcatgtaacagcattaaggaaacccggtcacagatcgtcagaggcactatccttatcccgtgtagaaccgcaatgcggggctcatttcccttgaatggaacctacttccaggtcaatgaggtctttgccgatcatgcgtccagtctgaatcctatcaatgtccccagggagctcatctgggaactgccccggcgcactgtgtactttggaacaagcgtgccaaccatctttaagggccttagtacagagaagattcaggcctgcttctggaaaggatatgtttgcgtcaggggcttcgaccgcaaaactcggggtccgaaacctttgattgcacgcctgcacttccccgccagtaaactgaagggtcagcaggccaacctggca

SEQ ID NO: 273 - DNA, 2700 bp, synthetic construct
  source 1..2700: mol_type = other DNA
gccaccatgcaaagcactgttaaaattcccacccggttttccaatcggcagaacaaaacagtgaactataacatagactacagcgatgatgacctcctcgaatctgaagacgactatggctcagaggaggctctgtccgaggaaaacgttcacgaggctagtgccaatccacagcccgaggatttccacggcattgatattgtaattaaccataggctgaagaccagtctggaggagggaaaagtgctggaaaaaacagtgccagacctgaacaattgcaaggaaaactacgagtttctgattaaatggactgacgagagtcatctccacaatacctgggaaacgtacgaatctattggccaggtgagagggttgaaacgccttgataattattgcaagcaatttataattgaagatcagcaagtacgccttgatccttatgtgaccgcggaggatattgaaattatggacatggaaagagagagacggcttgatgaatttgaggagttccacgtcccggaaaggatcattgactcccaaagagctagcttggaagacgggacttctcaactgcaatacctggtaaaatggaggagactgaactatgacgaggcaacttgggagaacgccaccgatatagttaagctcgcccccgaacaggtgaaacatttccagaacagggaaaactccaagatcctccctcagtattccagcaattacacaagccagagacctcgctttgaaaagctcagcgttcaaccgccatttatcaaaggcggggagctgcgcgattttcagctcacaggtattaattggatggcatttctctggtctaaaggggacaacggtatcttggctgatgaaatgggcctcgggaagaccgtccaaacggtggctttcataagctggctgatatttgcccggagacaaaatggcccccatatcatagtggtacctctgtctacaatgcctgcttggctggatactttcgaaaaatgggcaccggacctgaactgtatatgctatatgggaaatcagaaatcaagagacaccatacgcgaatatgagttttacacaaatccgagggcaaagggtaagaaaacaatgaagttcaacgttctgctgactacttacgaatatattttgaaggatagggccgaactcgggagcattaaatggcaatttatggccgttgatgaagcacaccggctcaagaacgccgagtctagcctgtatgagagcctgaatagctttaaagtggctaatcgcatgctcattacggggaccccactgcaaaataatataaaagagctggcggctctggtgaactttctgatgcccggcagatttacgatcgaccaggagattgactttgagaaccaggatgaggagcaggaagagtatatccatgacttgcacagacgcatccaaccatttattctccgacggctgaagaaggacgttgagaaatccctgccatctaaaacagagcggattctgagagtggaactgagcgatgtgcagacagagtattataaaaatattctgaccaagaactactccgcccttaccgcgggagccaaggggggtcatttttcactgttgaatataatgaacgagctgaaaaaggcatccaatcacccttatcttttcgacaacgctgaggagcgcgtgctccaaaagttcggcgatggcaagatgacccgggagaacgttctgaggggcctcatcatgagttctggcaaaatggtcctgctggaccagcttctcacccgcctcaagaaagatgggcatcgcgtgctgatttttagtcagatggtgcgaatgctggacatcctgggtgattacctcagtattaagggcatcaactttcagcggctcgatgggacggtgccaagcgcacagcgcaggatttctattgatcactttaacagtccagattccaacgattttgtgtttctgctgtctactcgggcaggcggcttgggaataaacctcatgacggcggatactgtagtcatcttcgatagcgactggaatccccaagccgatctgcaggctatggctcgggctcacaggattgggcaaaagaaccacgtcatggtttacaggctggtcagcaaggacaccgttgaagaggaagttctcgagagagcacgaaagaaaatgattctggaatacgcaatcatatccttgggagtgactgacgggaataaatacactaagaagaatgagcccaacgcaggagaactgtccgctatcctcaaatttggagctggcaacatgttcacagcaacagacaatcagaagaagcttgaggatctgaacctcgacgacgtgctgaatcacgctgaagatcacgttaccacaccagatctcggagagagccatctgggtggtgaggaattcctgaaacagtttgaagtgaccgactacaaagccgatatcgattgggacgacattattcctgaagaggagctgaagaagttgcaggatgaggaacagaagcgaaaggacgaagaatacgtgaaggagcagctggagatgatgaatcgacgcgataacgccttgaaaaagatcaagaactcagttaacggagacggaacggccgccaactctgatagcgacgatgattccacgtcacggagtagcagacgacgcgcaagagccaatgatatggattcaatcggagagagcgag

SEQ ID NO: 274 - DNA, 2286 bp, synthetic construct
  source 1..2286: mol_type = other DNA
gccaccatggggacaggcaagcggtccgacaaaggtcctgcctgttggaaaagacgcgttaagtccgaatacatgcgacttcgccagatgaaacggtttcgaagagcggacgaagtgaaaggcatgtttaatagcaacagacagaagatcatggaacgaactgacatcctcaaccaggagtggaagactagacgaattcagcccattcacataatgacccctgtgagctctcgaggcactagggaatgtactgtggacagtggatttcctgaattctcccggcaggttatccctctgaagaccttgaacgccgtggcaagcgtaccagtgatgtacagctggtccccacttcagcagaactttatggtggaggacgaaacagtcctccataatattccctacatgggtgatgaaatcctggatcaggatggcacttttatcgaggaattgataaagaactacgacggtaaggtgcacggtgaccgcgagtgcggctttattaacgatgagatatttgtagaactggtaaacgctcttgtacagtactcagacaatgaggacgacgaagaagacgaagagcaagactacaaagtggacaagatggacctctgtgacggaaaggaccatacagaagatccttgcaaggatgggcatagtaacgaatcacgagcaaactccgatggaagcaagaagtttccctctgacaaaatctttgaggccataagtagcatgttccccgataagggcagtctggaggagctgaaagaaaagtataaagaattgaccgagcagcagctccctggcgccctgccccccgagtgcacccccaatatcgatggcccaaacgcaaggagcgtgcagagagagcagtccctgcacagcttccacacccttttctgcaggcggtgcttcaagtatgattgctttcttcatccattccacgctactcctaacacttacaaacgcaaaaatctcgaaaaccttgtcgagagtaaaccctgtggcatcgactgttatatgtacctggtgcaggacggaatgtttagggagttcccagcaggtgtggtcgccgaacgcgccaagacgccctcaaaaagaagtgtggggagaaggcgaggacgccaacccaactccaactctagctcccgcccctccacacctaccatcagcagtgagaccaaggacgccgactctgatcgagaggacgggaaagaagacgaacgggataatgataaggatgacgaggacaagaaggatgaaaccacctctagctcagaggggaattccaggtgccagacccctgtcaaaatgaagctcactggcgaggcggaggctgtcgagtggtcaggcgcagaggcatccctctttcgagtgctgatcggcacctactatgacaacttcttggcaattgcaagattgatcggcaccaagacctgtagacaggtgtacgagtttagggtgaaggagagtgccatcattgcacgagcgcctgccgaagatgaggatacaccgcccagaaagaagaagaggaaacataggctgtgggccacccattgtcgaaagatccaactgaagaaagatggatcctctaaccacgtgtataattatcaaccctgcgatcatcccaggcagccttgtgactcctcctgtccttgcgtgaccgcccagaatttctgtgagaagttctgccaatgttcctcagagtgccaaaataggtttcctggttgtaggtgcaaagctcaatgcaataccaagcagtgcccctgctacttggcagtgcgggagtgtgacccagatctgtgtttgacctgcggcgctgctgatcattgggactctaagaacgtgagctgtaagaattgttcaattcagcggggcgcgaaaaagcacctgctgctggcgccgtctgacgtcgcaggatggggcattttcattaaggaaccagtgcagaagaacgagtttatttctgagtactgtggcgagatcatatctcaggatgaagccgacagacgggggaaagtgtacgataaatatatgtgctctttcctgtttaatctcaataatgactttgtggtggacgccacccgaaaagggaacaaaatcagattcgccaaccactcagtcaacccaaactgttacgccaaggtgatgatggtgtctggcgatcaccgaatcggtatttttgctaagagggccattcagaccggggaggagctgttttttgactatcgatattctcaggcagatgcactcaaatacgttgggatcgagcgcgagatggaaatagca

SEQ ID NO: 275 - DNA, 2244 bp, synthetic construct
  source 1..2244: mol_type = other DNA
gccaccatgggacagaccgggaaaaagagcgagaaaggaccagtgtgctggcggaagcgcgtgaagtccgagtacatgcggctccggcagctgaagcggttccgcagggctgatgaagtgaagagcatgttctcctctaacagacaaaaaattttggaaagaacagagattctcaaccaggagtggaagcagcgacgaatccagccagtgcatatccttaccagcgtgtcaagcctcagagggacccgcgaatgcagcgtgactagcgatctcgatttccctactcaggtgattcctctgaagactctcaatgctgtggcgtcagtgcctattatgtacagctggagtcctttgcaacagaattttatggtcgaagatgagaccgtactgcacaacattccgtacatgggagatgaagtactggaccaggatggtacatttatagaggaacttatcaagaattacgatggtaaggtgcacggggatagagagtgcggatttataaacgacgaaatctttgtggaactcgtcaacgctctgggccagtataacgatgacgacgatgatgacgacggtgacgacccagaagagcgagaggagaagcagaaggatcttgaagatcatagagacgacaaagaatctagacctccacgcaagttcccttctgataaaatcttcgaggccatcagttccatgtttcctgataaaggaaccgctgaagaactcaaggaaaaatacaaggaactgaccgaacagcagctgcccggagcccttccacctgagtgtactccaaatattgacggccctaatgctaagtcagtgcagcgagagcagagtcttcatagctttcacaccctgttttgccggcgctgttttaagtatgactgttttctgcacccctttcacgccaccccaaacacctacaagcggaagaatacagaaaccgctctggacaacaagccttgtggccctcagtgctatcagcacctggaaggcgcaaaagaatttgcggcagcccttaccgctgagcgcattaagactcctccaaagcgcccgggtgggcgccgccgaggccgactgccaaataacagtagccgaccatccaccccgaccatcaacgttctcgaaagcaaagatacggatagcgatcgcgaggctggcacagagactggtggcgaaaacaacgataaagaagaggaagaaaagaaagacgagactagttcctcttcagaggctaatagccgatgccaaaccccaattaagatgaagcctaatatcgagcccccagaaaatgtggaatggagtggagctgaagcttctatgttccgcgttctgattggaacctattatgataatttctgtgcaatcgcgcgcttgataggcacaaagacttgcaggcaggtgtacgagttccgggtgaaagagtcttccattatcgccccagcccccgcagaggatgtggacacaccaccaagaaaaaagaaaagaaagcacaggctttgggctgcccactgtcgaaaaattcagctcaagaaagacggtagcagcaatcacgtttacaattaccagccttgtgatcaccctaggcagccctgtgattcatcctgcccttgtgtcatagcccaaaatttctgcgaaaaattctgccaatgtagctcagagtgccagaataggttccccggctgtaggtgtaaggcacagtgtaacacgaagcagtgtccatgttacttggccgttcgcgagtgcgatcctgacctgtgtttgacatgtggtgccgctgaccactgggattccaagaacgtgtcctgtaagaactgtagtatccagcggggctcaaagaagcacttgctcctcgcgccctcagatgtagccggatggggaatctttatcaaagatccagtgcaaaagaatgaatttatctcagaatattgcggcgaaatcatttcacaggatgaagccgatcgaaggggcaaggtgtacgataagtacatgtgctcttttctttttaatcttaacaatgatttcgttgtggatgctacccgaaaaggaaataagattaggtttgcgaaccactcagtcaatcccaattgttatgcaaaggtaatgatggtcaacggcgaccacaggattggcattttcgccaaacgcgcaatccaaaccggggaggaactcttttttgactacagatacagccaggccgacgcgctgaaatacgtgggcatcgagagagagatggagatacct

SEQ ID NO: 276 - DNA, 1137 bp, synthetic construct
  source 1..1137: mol_type = other DNA
gccaccatggaagaaccagaagagcctgcagattccggacagtcactggttccagtgtacatctactcacccgagtatgtctccatgtgcgatagcctggctaagattcccaaaagggcttctatggttcacagcctgatcgaggcctacgcgcttcacaaacaaatgagaatcgtcaaacccaaagtagcaagtatggaagaaatggccacatttcacacggatgcctatttgcagcatctgcagaaggtttcccaagaaggcgatgacgatcacccggacagtattgaatatggtttggggtacgactgtcccgctacagagggcattttcgactatgctgcagcaattgggggcgcaaccataaccgctgcccagtgtctcattgacggaatgtgtaaggtagccattaattggtctggcggctggcatcatgccaaaaaagatgaagcctccggcttttgttacctgaatgatgccgtgttgggaattctgcgactgaggaggaaatttgaaagaattttgtatgttgacctggacctccaccatggggatggagtggaggatgcattttcctttaccagtaaggttatgaccgtgagcctgcataaattttcacccgggttttttccggggactggagacgtcagcgacgtgggactgggcaaaggccgatattattccgttaatgtccccatccaggacggaattcaggacgaaaaatactaccaaatctgtgaaagcgttcttaaagaagtctatcaggcttttaaccccaaagctgtggtgctgcagctcggcgcagacacgattgcaggcgaccctatgtgcagtttcaatatgacccccgtggggataggcaagtgccttaaatatattctccagtggcagctggcgacgttgatattgggcgggggagggtacaatttggcaaacacagctcgatgctggacctatcttacgggagttatactgggcaagaccctctcctccgaaatccctgaccacgaatttttcaccgcgtacggacctgattatgtgctggaaattaccccctcatgcaggcctgaccggaacgaaccacataggatccagcagattctcaattatattaaaggcaacctgaagcatgtcgtg

SEQ ID NO: 277 - DNA, 879 bp, synthetic construct
  source 1..879: mol_type = other DNA
gccaccatgtacgatgagattcccacagctgagagccttgttatcagagttgttagctccgtggacaaaaagttggaggtgaaaccgcgcttcctggagatatttagagaggacagttatcccaccgagttcgcttacaagagtaaggtcgtcctgttgttccagaaaatcgagggagtcgaagtgtgtcttttcggcatgtacgtccaggagtttgggtcagagtgcgctttccccaatcagcgaagagtgtacctgagttacctggattcagtcaaatatttcagaccagaagtgcgatcctacaacggcgaggcactgcgcactttcgtttaccatgaaatcttgattggatacctcgagtattgtaagctccgaggcttcacttcatgttacatctgggcttgcccgccacttaagggtgaagattatatcctgtactgtcaccccgagattcaaaagacaccgaagtctgacaaacttcgggagtggtacctcgctatgttgaggaaagctagtaaggaaggcatcgtggctgaaaccatcaacctgtacgatcactttttcatgcagacaggcgaatgtcgagcaaaggtgaccgctgctaggttgccatactttgacggagactattggccaggtgccgcggaggaccttatctatcagatgagtcaagaagaagacggacgcaagggaaataaaaagggtatgctcaagaaaactatcacaaaacgcgctcttaaagccagcgggcagaccgacctgtcaggtaacgcatccaaagatctgctccttatgcacagactgggggaaactattcatccaatgaaagaagacttcatcatggtgcacctgcagccatcctgcacacactgttgc

SEQ ID NO: 278 - DNA, 2244 bp, synthetic construct
  source 1..2244: mol_type = other DNA
gccaccatgggccagacagggaagaagagcgagaagggtcctgtttgctggcggaaaagagtgaaatccgaatatatgcggctgaggcagctcaagcggtttcggagggccgacgaggtcaagacaatgttttcctccaacagacagaaaatcctcgaacggacagagactctgaaccaggagtggaagcagcgaaggattcaaccagtccatattatgacgagcgttagtagcctccgcggtacaagagaatgttccgtgacatccgaccttgatttccccgctcaggtgattcccctcaaaacactgaacgcagtggcgtccgtgccaataatgtactcctggagtcctctgcaacagaactttatggtcgaagatgagaccgtactgcacaacatcccttacatgggcgacgaggttctggaccaggatggcacgttcattgaggagttgatcaaaaattacgatggcaaagtgcacggtgatagggagtgtggcttcattaatgacgaaatctttgtagagctcgtcaatgcccttggtcagtataatgatgatgacgacgacgatgatggagacgaccctgatgaacgagaagaaaagcagaaggacctggaagataacagggacgataaagagacctgccctccacgaaagttcccagcagacaaaatctttgaggccatcagctctatgttcccagacaaagggacagccgaggaactgaaggaaaagtacaaggagctcaccgaacagcagctcccgggcgcccttccccccgagtgtacacccaacatcgacggacccaacgctaaatcagtccagagagagcaaagcctgcactcattccacaccttgttctgccggcggtgctttaaatatgactgcttcctccaccctttccatgctaccccaaacacatacaagagaaagaacaccgaaacggcactggataataaaccgtgtggaccgcaatgttaccagcacttggagggagctaaagaatttgcggctgctctcacagcagagagaatcaagacacctccgaaaagaccaggcggaagacgcaggggcaggctgcctaataatagttccagacccagcacaccaaccatctctgtgctggaatccaaagacacagattctgaccgcgaagccggaacggagacaggtggagagaacaacgataaagaggaggaggagaagaaggacgagaccagttcctcctctgaggcgaacagtcgctgtcagacgcccatcaaaatgaaacctaacatcgaacctcccgagaacgtcgaatggagtggcgctgaagctagcatgtttcgggtgctcatcggaacatactatgataacttctgcgccatcgcgcgattgattgggactaagacatgtcggcaagtgtacgagttccgggtcaaggaatcaagtatcattgctccagttccaaccgaagacgtggataccccacctagaaagaagaagagaaagcaccgactttgggccgctcattgtagaaaaatacagctcaagaaggacgggtcctcaaaccatgtgtataactatcagccttgcgaccacccacggcagccttgcgatagctcctgtccttgcgtgatcgcacagaatttttgtgaaaagttctgtcagtgttcatctgaatgccagaacagattccctggatgtagatgtaaggctcagtgcaacactaaacagtgcccttgctacttggcggtccgcgaatgcgatccggatctgtgtctgacatgtggcgcagctgatcattgggattctaagaacgtctcttgcaagaattgctctatccagcgcggatctaaaaagcatctgctgcttgcgccaagtgacgtggccggttggggcatattcattaaagacccagttcaaaagaatgaattcatcagcgagtattgtggggagatcatctcacaggacgaagctgacaggagagggaaagtctatgataagtacatgtgcagtttcctctttaatctgaacaatgattttgtcgtcgacgcaactcgcaaaggaaacaaaatcagatttgcaaatcattctgttaatcctaactgttatgcaaaagtcatgatggtcaacggtgatcaccggattggcatctttgcgaagagagctattcagaccggggaagaactgttctttgattaccgctactctcaagcagatgctttgaaatatgtgggcatcgaaagagaaatggagatccca

SEQ ID NO: 279 - DNA, 501 bp, synthetic construct
  source 1..501: mol_type = other DNA
gccaccatgaccctggaagagttctccgcgggggagcagaaaacagagaggatggataaagtaggagatgcgttggaagaggtcctgtctaaagcactgtcacagcggacaatcaccgttggggtctacgaagcagctaagctcttgaatgttgaccccgataacgtagtgctctgcctcctggcagccgacgaggatgacgacagggacgtggcccttcagattcatttcacattgatccaggccttctgctgtgaaaacgacattaatattctcagggtgagcaatcccggacgccttgccgaactgctgctcctggaaaccgacgctggtcctgcagccagcgaaggcgctgagcagccacccgatcttcactgtgtgctcgtcaccaatccccacagctcccagtggaaagacccagcactctcccagcttatctgtttttgcagggagtctagatatatggatcagtgggtccctgttatcaacctccctgagaga

SEQ ID NO: 280 - DNA, 510 bp, synthetic construct
  source 1..510: mol_type = other DNA
gccaccatgctgggcacagtgaaaatggaagggcacgagacttccgattggaattcctattatgcggacacccaggaggcctactcttctgtgccagtcagcaacatgaattcagggctggggtccatgaatagcatgaacacttacatgacaatgaatactatgacaaccagcggcaatatgactccagccagttttaacatgtcatatgccaaccctgggctgggggctggcctgagccccggggccgtggcaggtatgcccggaggcagtgcgggcgccatgaattcaatgacggccgcaggggtgaccgctatggggaccgcactttctccaagcggtatgggcgctatgggtgcccagcaggcagcctctatgaatggcctcggaccttatgcagctgctatgaacccctgcatgtcacctatggcatacgcaccttccaatctgggtagatcccgggccggaggcggtggggatgctaaaacattcaagcggtcataccctcac

SEQ ID NO: 281 - DNA, 645 bp, synthetic construct
  source 1..645: mol_type = other DNA
gccaccatgcggagacagaagcggtttaagtgtgagaagcagcccggagccggtggcggcggagggagcggcagcggcggaagtggcgcaaagggcggtccagagagtcggaaggatcccagtggtgcttccaatccctcagcagacagccctctgcataggggcgtgcatggcaaaaccggacagctcgaaggtgctccggcccctgggccagcggcttccccgcagaccctcgatcatagcggggcaaccgccacagggggggcatccgaactcaagactccagcatcatcaaccgcacccccgatctcctccggtccaggagccctcgcaagcgtgccggcctcccacccggcccacggtttggctccccacgaaagtcagctccacctcaaaggggacccccattacagcttcaaccacccgttcagcataaacaatcttatgtcatccagtgagcagcaacacaaactggacttcaaggcttacgaacaggcactgcagtacagcccttatggatccactctccccgcctcacttcctctggggagtgcttctgttaccacacggtctcctatcgaaccctctgccctggagccagcctattaccagggggtctacagtagacctgttctgaacacctca

SEQ ID NO: 282 - DNA, 513 bp, synthetic construct
  source 1..513: mol_type = other DNA
gccaccatgctccaggcctgcaaaatggagggctttcccttggtccccccgccaagcgaggatttggtcccatatgatactgatctgtatcaacgccaaacccacgaatactatccctacttgagctcagacggtgagtcccattccgatcactattgggacttccatcctcaccatgtgcacagcgagttcgagtccttcgccgagaataacttcacagaactccagtctgtccaacctccccagctgcagcagctttacagacatatggagttggagcagatgcacgtccttgatacgccaatggtgccgcctcacccctccttgggccaccaagttagctacctgcctcgcatgtgtctgcagtacccatccctgagccctgcccagccttcctctgacgaggaagagggcgaacgacagagccctccccttgaggtgagcgatggggaggctgacggcttggagccaggtccagggctgctgccaggggagactgggtccaagaagaag

SEQ ID NO: 283 - DNA, 1350 bp, synthetic construct
  source 1..1350: mol_type = other DNA
gccaccatgccagtgaatcacctgagatgcgaaaagttgacattcaataacccaacgaccgagtttcgctacaagctgctgcgcgccggaggcgtcatggtgatgccggagggtgctgatacagtgagtagaccgagtcctgactaccccatgctccccactattccgttgagcgcattctctgacccaaagaaaaccaagccttctcatgggtccaaagatgcgaataaggaaagcagtaaaaccagcaagccccataaggttactaaagagcatcgcgagcgcccccgaaaagacagcgagagcaaatctagctctaaagaactggagagagagcaggcaaaaagctcaaaggacacgtctcgaaagctcggagagggccgcctgcccaaagaagagaaggcaccccctcccaaagcagccttcaaagaacccaaaatggccctgaaggagacaaagctcgaatccacttccccgaaaggcggccctcctccacccccccctcctccacccagagccagttctaaaagacccgcaaccgccgactccccaaaaccgagtgctaaaaagcaaaagaaatcctccagcaagggatccagaagcgcccctggaacctctcctcggaccagtagctccagctcattcagcgacaagaaacccgctaaggacaagagctcaacccgaggggagaaagtaaaagcagaatcagagcctagagaggccaagaaggcgcttgaagtagaggagtcaaacagtgaagacgaagctagctttaagagcgagtctgctcagtcatcaccatctaattcttccagctcttccgactcaagcagcgactccgacttcgaaccaagccagaatcattcccagggccctctgagaagcatggtggaggatctccaatctgaagagtctgacgaagatgactccagttccggcgaggaggccgccggcaaaacaaatcccggacgggatagccgcctgagtttctcagactccgaatctgacaacagcgccgatagcagcctcccatctagggagcctccgcctccacagaaacctcccccacccaattccaaggtgtccgggcgaaggagccctgagagctgttccaagcctgagaagattctgaagaaagggacatacgacaaggcctataccgatgaattggtcgagttgcatcggagactgatggcgctccgagagaggaacgttctgcaacagatcgtgaatctgattgaagagacgggacattttaatgtcactaacaccacttttgatttcgacctgtttagtttggatgagacaacagtgcggaagcttcaatcctgtctcgaggctgtggcgacc

SEQ ID NO: 284 - DNA, 666 bp, synthetic construct
  source 1..666: mol_type = other DNA
gccaccatgttgtttattaacgccacaaaacagtcagataaactgcagtccctgttgccaagcgagactggcctgggctaccttcatagagatgcagggggcgctaaagaggaaaatatgggtatcattacctttgagtgtattactaatgaccgagagccggaccacctgatcaaactgataacactcaaaaacatattctcacgacaactcccgaaaatgcctagagagtacatcgtgcgactggtgtttgatagaaatcactatacattctgtttgctcaagaagaataccgtgattggaggggtctgcttcagaccatactttgagcagaaatttgccgagatcgcctttttggctgtcacatccaccgaacaagtgaaggggtatggaacccgcttgatgaatcatctgaaggagcacgtgaaaaaatttggtatcgagtattttctgacatatgccgacaactttgcaatcgggtatttccggaaacaggggttctcccagaagatctccatgcccaaggagaggtggttcggatatattaaggattacgacggcggcacactcatggagtgctacatttttcctaacatcaattacctgcggctcagcgagatgttgtacgagcagaaaaaggctgtcaagaaggctatccactttatc

SEQ ID NO: 285 - DNA, 825 bp, synthetic construct
  source 1..825: mol_type = other DNA
gccaccatggggaatcttatgatctcattcctgaagaaagatacacaatcaattaccttggaggagctcgctaaaattatcaaaaagtgtaagcacgtggtcgctctgactgggtccggaacttccgccgaatcaaacataccgtcttttagagggtcatccaacagcatttggtcaaaatatgacccccggatttacggtaccatctgggggttttggaaatatccagagaaaatctgggaagttattagggacatatcaagcgattacgaaattgagatcaacaatggccacgtggcactgagcacactggaatccctggggtatctgaaaagcgtggtcacccagaatgtggacgggctgcatgaagccagcggcaatactaaagtgataagtctgcacggtaatgtatttgaagcggtgtgctgtacttgtaacaaaatcgttaaactgaacaaaattatgctccaaaaaacctcacactttatgcaccaactgccgcctgagtgtccttgcggagggatcttcaaacctaacatcatcctgtttggagaggtcgttagcagcgatctgctgaaggaagcagaggaggaaatagcaaagtgtgacctgctcttggtgattggcacttcttccaccgtaagcactgccaccaacctttgccactttgcctgcaaaaaaaagaaaaaaattgtagagattaatatctctaaaacgtatataactaacaaaatgagcgattatcatgtgtgcgcaaaattctccgagttgacaaaagttgccaatatcctgaagggaagctctgaaaaaaataagaagatcatg

SEQ ID NO: 286 - DNA, 1101 bp, synthetic construct
  source 1..1101: mol_type = other DNA
gccaccatggttaaggatgcttttaaggatatctctatatactttactaaagaggaatgggccgagatgggggactgggagaagacccggtaccggaatgtcaaaagaaactataacgcccttatcacaatcggcctgagggcaactcgaccggctttcatgtgtcacaggcggcaggcgatcaagctccaggtagacgacacagaagatagcgacgaggagtggaccccaaggcagcaggtaaaacctccatggatggcactccgcgttgagcagagaaaacaccagaagggcatgcctaaagcctccttctccaacgagagttccctgaaagagctgtcacgcacagccaacctcttgaacgctagcggttccgaacaggcccagaaacccgtgtccccgtcaggtgaggcaagtacatcaggacagcatagcaggctgaagcttgaacttcgcaaaaaagagactgaacgcaagatgtatagcctgagagagcgcaaaggacacgcctataaggaggtgtccgaacctcaggatgatgactatctgtactgcgaaatgtgccagaactttttcattgacagctgcgctgcccacggccctcctacattcgttaaggattccgcggtcgacaaaggtcaccctaatcggtccgctctcagtcttcctcccgggcttcggattgggcctagcggtattccccaggctggcctgggagtgtggaacgaggcatccgatctgcccttgggtctgcattttgggccatacgagggacggatcactgaagatgaggaggcagccaataacgggtattcctggctcattacgaaagggcgaaactgttacgagtatgtggatggtaaggataagtcttgggccaattggatgagatatgtaaattgtgcacgcgatgatgaggagcagaatttggttgccttccagtaccatcgacagatcttttaccgcacgtgccgggtgattaggcccggttgtgagctgctggtgtggtacggcgacgagtacggacaggaacttggaattaagtgggggtccaaatggaagaaggaactgatggcggggagagagcccaagccagaaatt

SEQ ID NO: 287 - DNA, 462 bp, synthetic construct
  source 1..462: mol_type = other DNA
gccaccatgtccacacccgccaggcggaggctcatgagagatttcaaaaggcttcaagaggaccctccagcaggggtctctggggctccttctgagaataatatcatggtgtggaacgctgtgatcttcggtcctgaaggtaccccgtttgaggatggcacattcaagctgaccatagaattcacagaagagtacccgaataaacccccaacagtcagattcgtgtctaaaatgttccacccaaatgtgtatgccgatggcagtatttgtctggacatccttcagaacagatggagcccgacatacgatgtgagtagtatactcacctccatccagagcctgctggatgagccaaatcctaatagtccagcgaattcccaggctgcccagctctaccaggagaataaaagagagtacgagaagagggtgtcagccatcgtggagcagagctggagggactgt

SEQ ID NO: 288 - DNA, 996 bp, synthetic construct
  source 1..996: mol_type = other DNA
gccaccatgggcgaaaagctggaactccgacttaagagcccggttggcgcagagcccgccgtctacccatggcctctccctgtgtacgacaagcaccatgacgcggcccacgagattatcgagaccatcaggtgggtctgtgaggaaatccccgacctgaagctggcaatggagaattacgtgcttattgattatgataccaagtctttcgagtccatgcagcggttgtgtgacaagtataaccgagccatagatagcattcaccagctgtggaagggcacgacacagcctatgaagctgaacacacgaccttcaaccggacttctcagacacatcctgcagcaggtctacaaccattcagttacagaccctgaaaagcttaataactatgaaccattcagtcccgaggtgtacggcgagactagtttcgacctcgtcgctcagatgatagacgagattaagatgactgacgatgatctgttcgtggatctcggttctggcgtcggccaggttgtgctgcaggtggccgccgctacaaactgcaaacatcattatggtgtcgagaaggctgatatccctgctaagtacgccgagaccatggaccgagagttccggaaatggatgaagtggtatggcaaaaagcatgccgagtacaccctggagaggggggatttcttgtctgaggaatggcgggagcgcattgcgaacacaagcgtcatctttgtaaacaattttgcttttggtcccgaggtggaccatcagttgaaggagagatttgccaatatgaaggagggcggccgcatcgttagtagcaagccttttgcacctcttaactttcgaattaactccagaaacctttccgatatcggcaccatcatgagagtggtggaactgtcccccctcaaggggtccgtgagctggacaggcaagcctgtcagttattatctgcacacaattgaccgcactatacttgaaaactatttttcctccttgaag

SEQ ID NO: 289 - DNA, 1155 bp, synthetic construct
  source 1..1155: mol_type = other DNA
gccaccatggggtctgcagctattgcagaggtgctcttgaacgcaaggtgcgatctccacgcagtcaactaccacggcgacacacctctgcacatagcagcgagggaaagttaccacgactgcgttctcctcttcttgagccgaggtgcgaatcccgaattgaggaacaaggaaggggacacagcatgggatctgacacctgaacgcagcgacgtctggttcgccttgcagctgaaccgaaagttgcggctgggtgtcggtaacagagccatccgcacagagaaaattatttgcagagacgtggcaaggggctacgagaatgtgcccatcccatgtgtgaatggagtggatggagaaccatgccctgaggattacaaatatatctctgagaattgcgagacaagcaccatgaacatagacaggaatattacccaccttcagcactgtacgtgcgtcgacgactgctccagtagtaactgcctctgcggtcagctcagcattcgatgctggtatgacaaggatggtaggctgctccaggagttcaataagatcgaacctcccctgatttttgagtgtaaccaagcatgttcatgttggcggaattgtaaaaatcgagtcgtccaaagtggcataaaagtgcggcttcagttgtacagaaccgccaaaatggggtggggagtgagagcgcttcagacaatacctcaagggacttttatctgtgagtacgtgggcgagcttatttccgacgcggaggcggatgttcgagaggatgatagctatctctttgatctggataataaggacggagaagtctattgcattgacgctagatactacggcaacatttcccggttcataaatcacctgtgcgaccctaacatcatccctgtaagagtttttatgttgcaccaagacctgaggtttccaagaattgcatttttctctagcagagacataaggaccggcgaagaactcggattcgactatggtgacaggttctgggacatcaaatcaaaatactttacgtgtcagtgtggtagcgaaaagtgtaagcatagtgccgaggccatcgcactggagcagtctcgacttgccagactcgacccccatcccgaactgctcccagagctgggttctcttcccccggtgaataca

SEQ ID NO: 290 - DNA, 1242 bp, synthetic construct
  source 1..1242: mol_type = other DNA
gccaccatggctgagaacctgaagggctgcagcgtgtgttgcaaaagctcctggaaccagttgcaagatctctgtcggcttgctaagctgtcctgtccagctctcggaatttccaaaagaaatctctacgacttcgaggttgagtacctgtgcgactataagaaaattcgggagcaagagtactatctcgtgaagtggcgagggtaccctgacagcgagagcacatgggagccccgccagaacttgaagtgcgtgcgcattttgaagcagttccacaaggacctggagagggagctgcttagaaggcaccaccgcagtaagaccccaagacacctcgacccgtccctcgcaaactacctggtccagaaggcaaagcagcggcgagctctcaggagatgggagcaggagctgaatgcgaaacgaagtcatctgggcaggattactgtcgagaacgaagttgaccttgatggacctcctagggcgttcgtatatattaacgaatatcgggtgggcgaaggaatcactttgaaccaggtggccgttgggtgtgaatgtcaggattgcctctgggcccccactggcggctgttgcccaggggcctccctccataaatttgcatataatgatcagggtcaggtgagacttcgagcaggacttcctatctatgagtgtaactcacgatgccggtgtggttatgactgtccaaacagggtggtgcagaagggaattcgatacgatctttgtattttccgcacagacgatggccgaggctggggcgtgcgcaccctggaaaaaataagaaagaactcattcgtgatggagtatgtgggagaaatcatcacttcagaggaagctgagcgacggggacagatttatgaccgccaaggcgcaacatacctgttcgacctggattatgtggaggatgtgtatacagtcgacgcagcctactatgggaacatctcccatttcgtgaatcattcctgtgatcccaacctgcaggtgtataatgtcttcatagacaacctcgacgagcgcctgcccaggatcgccttttttgcaactaggaccatcagggctggagaagaactgacctttgactacaatatgcaagtggacccagtggacatggagagtactcggatggatagcaatttcggattggcaggactgccgggcagtcccaagaaacgcgtcagaatcgagtgtaagtgtggaaccgagagctgcagaaaatacctcttc

SEQ ID NO: 291 - DNA, 1941 bp, synthetic construct
  source 1..1941: mol_type = other DNA
gccaccatgcggctgggactcaaggagggaaggccattttcaggtgtaactgcatgccttgacttttgtgcccacgcccatcgggatctgcataacatgcagaatggcagcactctcgtgtgcacgctgacgagagaagataaccgagagttcgggggtaaacctgaggacgagcagctccacgtactgcctctgtacaaagtctccgatgtagacgagtttgggagcgttgaggctcaagaggaaaagaagcgctctggggccattcaagtgctgtcctcctttagacgaaaggtgcgaatgctggcagagcccgttaaaacctgtcgccagagaaaacttgaagctaagaaagcagcagccgagaagcttagcagtcttgaaaacagttccaacaaaaatgaaaaagaaaagagtgctcccagccggacaaagcagactgaaaatgcaagtcaagccaaacagctcgcggagctgctgcggctgtctggaccagttatgcaacagtcccaacagccacagcctcttcagaagcagcccccccaaccacaacagcaacagaggccccagcagcaacagccacaccaccctcagacagagagtgtgaactcctatagtgcctccggcagcaccaacccctatatgcggcgaccgaatccagtgagcccctaccccaacagtagccacacctccgacatttatgggagtactagtcccatgaatttctactccacctcatctcaagcagccggtagttatcttaattctagtaaccctatgaacccctaccccgggctgctgaaccagaacactcagtacccctcttaccagtgcaatgggaatctgtctgtggataactgtagcccctacctgggatcctactccccacagagtcagccaatggacttgtacaggtatccttcccaagaccctttgtccaagttgagtctgcctcctatccacactttgtaccagcctagattcggcaactcccagtccttcactagcaagtatctgggctatggcaatcagaacatgcagggcgacggcttctcctcttgtacaatcagaccaaatgtgcatcacgtggggaagctgcccccctatccaacccatgagatggatggtcactttatgggcgccacctctcggcttccccccaacctcagcaaccccaacatggactacaagaacggggagcaccacagtccgagccacataattcacaactactccgcagccccagggatgttcaattccagcctccatgccctgcatctgcagaacaaggagaatgatatgttgagccatactgctaacggactctcaaagatgctccccgccctcaatcacgataggacagcctgtgtgcaaggaggtctccacaagctttctgacgctaacgggcaggagaagcaaccattggccttggtgcagggggttgcatcaggtgccgaggataatgacgaggtctggtccgacagtgaacagagctttctggacccagatattggcggagtggcggtggcaccaacccatggcagcattctgatcgaatgcgctaaacgcgagctgcatgccaccactcctttgaaaaatcccaatcgaaatcaccccaccagaattagtcttgtgttttaccaacacaagtctatgaatgagccaaaacacggcctggctctctgggaggctaagatggcagagaaagctcgggagaaggaggaagagtgtgagaaatacggccccgactacgtccctcagaagagccacggaaagaaggtcaagcgagaaccggctgaacctcacgaaacttccgaacctacttatctgcggttcatcaagtctctcgcggaaaggactatgtcagtaaccacggactccacggtgactacctctccgtacgccttcaccagagtcaccggtccatacaataggtacatc

SEQ ID NO: 292 - DNA, 1362 bp, synthetic construct
  source 1..1362: mol_type = other DNA
gccaccatgctgctcgaccccggcaccccaatggacgctgacctggtggcttccagcactgtagtgtgggaacaggacgcagacccctttgccgggacagctgatgatttccccgcctttaacgaggaggagctcgcttggctgatggaactgcttccacagggcggctctggcggactgctcgatcctggaacaccgatggacgcggacttggttgcatcatctaccgtggtgtgggaacaggacgccgatccatttgcaggcactgctgatgattttcctgcgttcaatgaggaagaactggcgtggctcatggagcttcttccccaagcccgggggggatctgggggtctgttggaccccggaacacccatggatgcggatctggtggcttcttccacagttgtgtgggaacaagacgcggacccattcgctggaacggccgacgactttcctgccttcaacgaggaggaattggcctggctgatggagcttctgccccaagggggctctggtggacttctggaccctggtacgccgatggacgcagatcttgtggcttccagcactgtggtttgggagcaggacgcagacccttttgccgggactgccgacgattttcccgcattcaatgaagaagaactggcttggctcatggaacttttgcctcaggcgaggggtgggtccggagggctcctcgaccctgggacacctatggatgccgatcttgttgcgagctctaccgtggtctgggaacaagatgccgatccgttcgcaggtacagccgacgatttcccagccttcaacgaagaggagctggcgtggctgatggagctgctgccccaaggcggcagcggcgggctcctcgaccctggcacaccaatggacgctgatctggtcgcctcctccactgtcgtttgggagcaagacgcagaccctttcgctgggacagccgatgattttcccgcctttaacgaggaagagcttgcatggctgatggaactccttccacaggctcgcggcggctctgggggtggtgggtccggcggagatgcactcgatgattttgatctggatatgctgggatcagacgcgctggacgacttcgatctcgatatgctgggctccgacgctctcgacgatttcgacctcgatatgctcggctctgacgcattggacgacttcgatctggatatgctggcacgcgggtcagatgcactcgatgactttgatctggacatgctcggcagtgatgcactcgacgactttgaccttgatatgctgggatccgatgctcttgacgactttgacttggacatgctgggatctgacgccctcgacgacttcgatctcgatatgctg

SEQ ID NO: 293 - DNA, 324 bp, synthetic construct
  source 1..324: mol_type = other DNA
gccaccatggattccgcttggcgcttgcgcatccccgagtctacttgcgcaaaagatattcagaaagcagctgctgaagccgctctggcttttcaggacgagacttgtgatacaacaacaacaaaccatggactcgatatggaggagactatggttgaagccatttacaccccagagcagtcagaaggcgcattttatatggacgaggagacaatgttcggcatgcccactctgctcgacaacatggccgaagggatgcttctcccaccaccctccgttcaatggaaccataattacgacggtgagggtgatggtgacgtaagt

SEQ ID NO: 294 - DNA, 159 bp, synthetic construct
  source 1..159: mol_type = other DNA
gccaccatggacgcactcgacgacttcgatttggacatgcttggctctgatgcactggacgattttgacttggatatgctgggtagcgatgcactcgatgacttcgatctcgatatgctgggttctgacgcgctggatgacttcgatctcgatatgctg

SEQ ID NO: 295 - DNA, 393 bp, synthetic construct
  source 1..393: mol_type = other DNA
gccaccatggatgctctggacgattttgacctggacatgttgggtagcgacgcgcttgacgactttgatttggatatgctggggtcagatgcgctggacgactttgatcttgacatgctcgggtctgacgctttggatgatttcgacttggatatgctgggaagcgacgccctggacgatttcgatctggatatgctcggatcagatgcgttggacgacttcgatttggatatgctgggctctgacgccctcgatgacttcgacctggatatgcttggctccgacgcacttgatgacttcgaccttgacatgctgggatccgacgctttggacgattttgatttggatatgcttgggtcagatgccctggatgatttcgacctcgacatgctg

SEQ ID NO: 296 - DNA, 2847 bp, synthetic construct
  source 1..2847: mol_type = other DNA
gccaccatgcctaccgtcgcctccattcgcgaactcatggaagaacgatacggagagaaaggaaaggctatccggatcgaaaaggtcatctacacaggcaaagagggtaagagcagccgcgggtgccccatcgcgaagtgggtgatccgccgacacaccttggaagagaagctgctttgcttggtgcggcaccgggcaggacatcactgtcagaacgcagtgattgtcatccttatcctcgcctgggaggggattccacggagccttggggatacgctgtatcaggagcttacagatacattgcggaagtacggaaatcctacctccaggagatgcggactgaatgatgatcggacatgcgcatgtcagggcaaagatccgaacacatgtggcgcatctttctctttcggctgttcctggtctatgtacttcaacggctgcaagtatgcgagaagtaaaacgcccagaaagttccgcctggcgggagacaatcctaaggaggaggaagtgctcaggaagtctttccaggatttggccactgaggtggcccctctgtataagcggctggccccccaggcctatcagaaccaggtgacaaacgaggagatcgccatcgattgcaggctgggtctgaaagagggcaggccctttgcgggcgtaaccgcttgtatggatttctgcgcccacgcacacaaagaccagcacaatctgtataacggctgcactgttgtctgtaccctgacaaaggaggataacagatgcgtgggcaaaatccccgaggacgagcagctgcacgttctgcctctgtacaagatggctaacacagatgaattcggatctgaggagaatcagaacgccaaggtcggctctggggccatccaggtgctgaccgctttcccccgggaagttcgccgcctccctgagcctgcgaagagttgcaggcagaggcagcttgaggcgagaaaagcggctgcagagaagaagaagatacaaaaggagaaactgtctactccggagaaaatcaagcaggaagctctggagttggccggaatcacatctgatccaggtttgtctctgaagggcgggctgagccaacaggggctcaaaccatccctcaaagtggagccacagaatcacttcagttcatttaaatattccggaaacgcagtagtcgagagctattctgtgctcggaaactgtagaccctccgatccatactcaatgaattcagtttactcttatcatagctactacgcacagccctctctgacaagcgtgaatggattccactccaagtacgctctgcccagcttctcttattacgggtttcccagctccaatcccgtgttcccaagccagtttctcggtcccggggcttggggacactcaggctcatctggttccttcgaaaaaaaacccgatcttcacgctctgcacaattctcttagcccagcctatgggggggcagaatttgctgaacttccatcccaggcagtaccaacagatgcccaccaccccaccccccatcaccaacagcccgcataccccggcccaaaagaatatcttctcccgaaggcccccctgctccactctgtgagccgggacccgtccccctttgcccagtcctcaaattgttataacagaagtataaaacaggagcctgtcgaccctttgactcaagccgagcccgtccccagagacgcgggcaagatgggcaagacaccactgtccgaggtgagtcagaacggcgggccctcacacctctgggggcaatactcaggtgggccctccatgagccccaagaggaccaacggagtcggcgggagctggggcgtttttagtagcggagagagtcccgccattgtccccgataagctgtcatctttcggcgccagctgccttgcacccagccacttcactgacgggcagtggggacttttcccgggggaagggcagcaagccgcctcccacagcggcggccgacttagaggaaaaccatggtctccttgtaaattcggcaattccaccagtgcccttgccggtccatcactcactgaaaaaccctgggccctgggggccggagactttaacagcgctctgaaggggtcccctggatttcaggataaactctggaacccaatgaaaggagaagagggccggatcccagcggctggcgccagtcagcttgatcgggcttggcagtcctttggattgccgctcgggtcctccgagaagctgttcggggccctgaagagcgaagagaagctgtgggatccattttctctggaagaggggcctgccgaagagccaccgtctaaaggcgcagttaaggaagagaagggcggggggggcgcagaagaagaagaggaagagctgtggtctgactccgaacataacttcttggacgaaaacatagggggggtcgccgtggctccagcccatggttcaatccttattgagtgtgcgcggcgagagctgcatgccacaacaccactgaagaaacccaaccggtgtcatcctacgcggatatctctggtcttttatcaacacaagaacttgaatcagcctaaccatggactggcactgtgggaagccaagatgaagcagttggcagaacgggccagggcacgccaggaggaggcagcaagactcggcctcggccagcaagaagccaaactgtacggcaaaaaaagaaagtggggaggcaccgtggttgccgaacctcagcagaaggaaaaaaaaggagtcgttcccaccaggcaggccctggcagtgcccaccgattcagcagtcaccgtttcaagctacgcttacactaaggtaacaggcccttattccagatggata

SEQ ID NO: 297 - DNA, 948 bp, synthetic construct
  source 1..948: mol_type = other DNA
gccaccatgccttcagggcagatcagcaaccaggccctggctctggcccctagctccgctccagtgctggcccagactatggtgccctctagtgctatggtgcctctggcccagccacctgctccagcccctgtgctgaccccaggaccaccccagtcactgagcgctccagtgcccaagtctacacaggccggcgaggggactctgagtgaagctctgctgcacctgcagttcgacgctgatgaggacctgggagctctgctggggaacagcaccgatcccggagtgttcacagatctggcctccgtggacaactctgagtttcagcagctgctgaatcagggcgtgtccatgtctcatagtacagccgaaccaatgctgatggagtaccccgaagccattacccggctggtgaccggcagccagcggccccccgaccccgctccaactcccctgggaaccagcggcctgcctaatgggctgtccggagatgaagacttctcaagcatcgctgatatggactttagtgccctgctgtcacagatttcctctagtgggcagggaggaggtggaagcggcttcagcgtggacaccagtgccctgctggacctgttcagcccctcggtgaccgtgcccgacatgagcctgcctgaccttgacagcagcctggccagtatccaagagctcctgtctccccaggagccccccaggcctcccgaggcagagaacagcagcccggattcagggaagcagctggtgcactacacagcgcagccgctgttcctgctggaccccggctccgtggacaccgggagcaacgacctgccggtgctgtttgagctgggagagggctcctacttctccgaaggggacggcttcgccgaggaccccaccatctccctgctgacaggctcggagcctcccaaagccaaggaccccactgtctcc

SEQ ID NO: 298 - DNA, 765 bp, synthetic construct
  source 1..765: mol_type = other DNA
gccaccatgccttcagggcagatcagcaaccaggccctggctctggcccctagctccgctccagtgctggcccagactatggtgccctctagtgctatggtgcctctggcccagccacctgctccagcccctgtgctgaccccaggaccaccccagtcactgagcgctccagtgcccaagtctacacaggccggcgaggggactctgagtgaagctctgctgcacctgcagttcgacgctgatgaggacctgggagctctgctggggaacagcaccgatcccggagtgttcacagatctggcctccgtggacaactctgagtttcagcagctgctgaatcagggcgtgtccatgtctcatagtacagccgaaccaatgctgatggagtaccccgaagccattacccggctggtgaccggcagccagcggccccccgaccccgctccaactcccctgggaaccagcggcctgcctaatgggctgtccggagatgaagacttctcaagcatcgctgatatggactttagtgccctgctgtcacagatttcctctagtgggcagggaggaggtggaagcatggagcttctttctcctcctctgcgggatgttgacctgactgcgcccgacggctctctttgctccttcgccacaaccgacgacttctacgatgatccatgttttgacagccccgatctcaggttctttgaggatctcgatcctagactgatgcacgtgggcgcactgctcaaacctgaggaacatagc

SEQ ID NO: 299 - DNA, 393 bp, synthetic construct
  source 1..393: mol_type = other DNA
gccaccatggacgcgctggacgatttcgatctcgacatgctgggttctgatgccctcgatgactttgacctggatatgttgggaagcgacgcattggatgactttgatctggacatgctcggctccgatgctctggacgatttcgatctcgatatgttagggtcagacgcactggatgatttcgaccttgatatgttgggaagcgatgcccttgatgatttcgacctggacatgctcggcagcgacgccctggacgatttcgatctggacatgctggggtccgatgccttggatgattttgacttggatatgctggggagtgatgccctggacgactttgacctggacatgctgggctccgatgcgctcgatgacttcgatttggatatgttg

SEQ ID NO: 300 - DNA, 1167 bp, synthetic construct
  source 1..1167: mol_type = other DNA
gccaccatgggtaccggcagcgccgccatcgccgaagtccttctgaatgcgcgctgtgacctccatgctgtcaactaccatggggacacccccctgcacatcgcagctcgggagagctaccatgactgcgtgctgttattcctgtcacgtggggccaaccctgagctgcggaacaaagagggggacacagcatgggacctgactcccgagcgctccgacgtgtggtttgcgcttcaactcaaccgcaagctccgacttggggtgggaaatcgggccatccgcacagagaagatcatctgccgggacgtggctcggggctatgagaacgtgcccattccctgtgtcaacggtgtggatggggagccctgccctgaggattacaagtacatctcagagaactgcgagacgtccaccatgaacatcgatcgcaacatcacccacctgcagcactgcacgtgtgtggacgactgctctagctccaactgcctgtgcggccagctcagcatccggtgctggtatgacaaggatgggcgattgctccaggaatttaacaagattgagcctccgctgattttcgagtgtaaccaggcgtgctcatgctggagaaactgcaagaaccgggtcgtacagagtggcatcaaggtgcggctacagctctaccgaacagccaagatgggctggggggtccgcgccctgcagaccatcccacaggggaccttcatctgcgagtatgtcggggagctgatctctgatgctgaggctgatgtgagagaggatgattcttacctcttcgacttagacaacaaggatggagaggtgtactgcatagatgcccgttactatggcaacatcagccgcttcatcaaccacctgtgtgaccccaacatcattcccgtccgggtcttcatgctgcaccaagacctgcgatttccacgcatcgccttcttcagttcccgagacatccggactggggaggagctagggtttgactatggcgaccgcttctgggacatcaaaagcaaatatttcacctgccaatgtggctctgagaagtgcaagcactcagccgaagccattgccctggagcagagccgtctggcccgcctggacccacaccctgagctgctgcccgagctcggctccctgccccctgtcaacacaagtacc

SEQ ID NO: 301 - DNA, 1032 bp, synthetic construct
  source 1..1032: mol_type = other DNA
gccaccatgcggtaccccacggcagaatctcaagtgtgtgcgtatcctcaagcagttccacaaggacttagaaagggagctgctccggcggcaccaccggtcaaagaccccccggcacctggacccaagcttggccaactacctggtgcagaaggccaagcagaggcgggcgctccgtcgctgggagcaggagctcaatgccaagcgcagccatctgggacgcatcactgtagagaatgaggtggacctggacggccctccgcgggccttcgtgtacatcaatgagtaccgtgttggtgagggcatcaccctcaaccaggtggctgtgggctgcgagtgccaggactgtctgtgggcacccactggaggctgctgcccgggggcgtcactgcacaagtttgcctacaatgaccagggccaggtgcggcttcgagccgggctgcccatctacgagtgcaactcccgctgccgctgcggctatgactgcccaaatcgtgtggtacagaagggtatccgatatgacctctgcatcttccgcacggatgatgggcgtggctggggcgtccgcaccctggagaagattcgcaagaacagcttcgtcatggagtacgtgggagagatcattacctcagaggaggcagagcggcggggccagatctacgaccgtcagggcgccacctacctctttgacctggactacgtggaggacgtgtacaccgtggatgccgcctactatggcaacatctcccactttgtcaaccacagttgtgaccccaacctgcaggtgtacaacgtcttcatagacaaccttgacgagcggctgccccgcatcgctttctttgccacaagaaccatccgggcaggcgaggagctcacctttgattacaacatgcaagtggaccccgtggacatggagagcacccgcatggactccaactttggcctggctgggctccctggctcccctaagaagcgggtccgtattgaatgcaagtgtgggactgagtcctgccgcaaatacctcttcagtac

SEQ ID NO: 302 - DNA, 141 bp, synthetic construct
  source 1..141: mol_type = other DNA
gccaccatgtccaggcggaaacagagcaacccccggcagatcaagcgttccctcggagacatggaggccagagaggaggtgcagttggtgggtgccagccacatggagcaaaaggccacggcacctgaagccccgagccct

SEQ ID NO: 303 - DNA, 363 bp, synthetic construct
  source 1..363: mol_type = other DNA
gccaccatgaaggagggtgaaaacaataagcccagggagaaatcagaaggaaacaagaggaaatccagtttctccaacagcgctgatgatattaaatctaaaaaaaagagagagcaaagcaatgatatcgctcggggctttgagagaggactggaaccagaaaagatcatcggagcaacagattcctgcggtgacttaatgttcttaatgaaatggaaagacacagatgaagctgacctggttcttgcaaaagaagctaacgtgaagtgtccacagattgtgatagcattttatgaagagagactgacgtggcacgcatatccagaggatgcggaaaacaaagaaaaagaaagcgcgaagagc

SEQ ID NO: 304 - DNA, 1260 bp, synthetic construct
  source 1..1260: mol_type = other DNA
gccaccatgtctgtggcgttcgcagccccgaggcagcggggcaagggcgaaatcacgcccgccgccatccagaagatgctggatgaaaacaaccatcttattcagtgtataatggactatcagaacaaagggaaggcctcggagtgctcgcagtatcagcagatattgcatacaaacctggtataccttgctacaatagcagactctaatcaaaatatgcagtctctcttaccagcaccgcccacacagactatgccaatgggtcctggagggatgagtcagagtggccctccaccccctccccgctctcacaacatgccttcagatggaatggtgggtgggggccctcctgcaccacacatgcagaaccagatgaacggccagatgcctgggcctaaccatatgccaatgcagggacctggacccagtcagctcagcatgacaaacagctccatgaatatgccttcaagtagccatggctccatgggaggttacaaccattctgtgccgtcatcccagagcatgcccgtgcagaaccagatgacaatgagtcaggggcagccaatgggaaactatggtcccagaccaaacatgaatatgcaaccaaatcaagggccgatgatgcaccagcagcctccttctcagcagtacaatatgccacctggaggggcacagcattaccaaggacagcaggcgcccatggggctgatgggccaagttaaccaaggcagtcacatgatgggccagcgacagatgcctccctacagacctccgcaacagggcccaccacagcagtactcaggccaggaagactattatggggaccaatacagtcatggtggacaaggtcctccagaaggcatgaaccagcaatattaccctgatggtcataatgattacggttatcagcaaccgtcgtatcctgaacaaggctacgataggccttatgaggattcctcacaacattactacgaaggaggaaactcccagtatggccaacagcaagacgcttaccagggaccacctccacagcaaggatacccaccccagcagcagcagtacccgggacagcagggatacccagggcagcagcagagctatggtccttcgcagggcggtccaggtcctcagtatcctaattatcctcagggtcaaggtcagcagtatgggggctatagaccaacacagccaggaccaccccagccaccccagcagaggccttatgggtacgaccagggacagtatggaaattaccagcag

SEQ ID NO: 305 - DNA, 1179 bp, synthetic construct
  source 1..1179: mol_type = other DNA
gccaccatggctagggacagcaaagtggagaacaaaacaaagaagctgagagtgttcgaagccttcgccggcattggcgcccagagaaaggccctggagaaagtgaggaaggacgagtacgagatcgtgggactggccgagtggtatgtgcccgccatcgtcatgtaccaggccatccataacaacttccacaccaagctcgagtacaagtccgtcagcagagaggagatgatcgactacctcgagaacaagaccctgtcctggaacagcaagaaccccgtcagcaacggatactggaagaggaagaaggatgacgagctgaagatcatctacaacgccatcaagctgtccgaaaaggagggcaacattttcgacatcagggacctctacaagaggacactgaagaacatcgacctgctcacctacagcttcccttgccaggacctgagccagctaggcatccagaagggcatgaagaggggaagcggcaccagatccggcctgctctgggagatcgaaagagccctggactccaccgagaagaacgacctgcctaagtacctcctcatggagaacgtgggagccctgctgcacaagaagaacgaggaggagctgaaccaatggaagcagaagctggagagcctgggctaccagaacagcatcgaagtcctcaatgctgccgatttcggatccagccaggccaggaggagagtgttcatgatctccaccctcaatgagttcgtggaactgcctaagggcgacaagaagcccaagagcatcaaaaaggtgctgaacaagatcgtgagcgagaaggacatcctcaacaacctgctgaaatacaacctcaccgaattcaagaagaccaagtccaacatcaacaaggccagcctgatcggctactccaagttcaactccgagggctatgtgtacgaccccgagttcacaggccccacactgacagctagcggcgccaactccaggatcaagatcaaggacggcagcaacatcaggaagatgaacagcgacgagaccttcctgtacatcggctttgacagccaggacggcaagagagtgaacgaaatcgagttcctgaccgagaaccagaagatcttcgtgtgtggcaacagcatcagcgtggaggtgctggaggccatcattgacaagatcggcggccctagc

SEQ ID NO: 306 - DNA, 1152 bp, synthetic construct
  source 1..1152: mol_type = other DNA
gccaccatggacgcgaaatcacttacggcatggtcgagaacactggttacgttcaaggacgtgtttgtggactttacacgtgaggagtggaaattgctggatactgcgcaacaaattgtgtatcgaaatgtcatgcttgagaattacaagaacctcgtcagtctcggataccagttgacgaaaccggatgtgatccttaggctcgaaaagggggaagaaccttggctggtatcgggaggtggttcgggtggctctggatcaagcccaaagaagaaacggaaggtggaagcctcagtgcaggtgaaaagggtgctggaaaaatcccccggcaaactcctcgtgaagatgcccttccaggcttcccctggcggaaaaggtgaagggggtggcgcaaccacatctgcccaggtcatggtcatcaagcgacctggaaggaaaagaaaggccgaggctgaccctcaggccattccaaagaaacggggacgcaagccagggtccgtggtcgcagctgcagcagctgaggctaagaaaaaggcagtgaaggaaagctccatccgcagtgtgcaggagactgtcctgcccatcaagaagaggaagactagggagaccgtgtccatcgaggtcaaagaagtggtcaagcccctgctcgtgtccaccctgggcgaaaaatctggaaaggggctcaaaacatgcaagtcacctggacggaaaagcaaggagtctagtccaaaggggcgctcaagctccgcttctagtccccctaaaaaggaacaccatcaccatcaccatcacgccgagtctcctaaggctcctatgccactgctcccaccacctccaccacctgagccacagtcaagcgaagaccccatcagcccacccgagcctcaggatctgtcctctagtatttgcaaagaggaaaagatgcccagagcaggcagcctggagagtgatggctgtccaaaagaacccgccaagacccagcctatggtggcagccgctgcaactaccaccacaaccacaactaccacagtggccgaaaaatacaagcatcgcggcgagggcgaacgaaaggacattgtgtcaagctccatgcccagacctaaccgggaggaaccagtcgatagtaggacacccgtgactgagagagtctca

SEQ ID NO: 307 - DNA, 1047 bp, synthetic construct
  source 1..1047: mol_type = other DNA
gccaccatggctagcagccccaagaagaagcggaaggtcgaggcaagcatggagaaggcatttcggccacactttttcaaccacgggaagccagacgcaaacccaaaggagaagaaaaactgccactggtgtcagatccgaagtttcgccacccatgctcagctgccaatctcaattgtgaatagggaagacgatgcttttctcaaccccaatttcaggttcatcgaccactctatcattggcaagaacgtgcccgtcgctgatcagagtttcagggtgggatgcagctgtgcatccgacgaggaatgcatgtactcaacttgccagtgtctggacgagatggcaccagacagtgatgaggaagccgatccctatacccgaaagaaaaggtttgcctactatagccagggcgctaagaaaggactgctcagggatagagtgctgcagtcccaggagcccatctacgaatgccatcaggggtgcgcctgttctaaggactgtcccaacagagtggtcgagcggggtcgcacagtgcctctgcagatcttcagaactaaagatcggggctggggagtgaagtgtcctgtcaatatcaagcgcgggcagtttgtcgatcgatacctgggcgagatcattaccagcgaggaagccgacaggagacgggctgaatccacaatcgcacgccgaaaggacgtgtatctgttcgccctcgataaattttcagaccccgatagcctggaccctctgctcgctggacagcccctggaggtcgatggggaatatatgtccggtcctacacggttcatcaaccactcttgcgacccaaatatggcaatttttgcccgcgtgggagaccatgctgataagcacatccatgacctggctctcttcgcaatcaaggatattcctaaaggcaccgagctgacatttgactacgtcaatgggctgactggcctggagtccgacgcacacgatccatctaagatcagtgaaatgactaagtgcctgtgtggcaccgccaagtgtcggggatatctctgggaattc

SEQ ID NO: 308 - DNA, 921 bp, synthetic construct
  source 1..921: mol_type = other DNA
gccaccatggctagcagcccaaagaagaagagaaaagtggaagcatcaatggcacctaaaagacagtcagcaatcctcccccagcctaaaaaaccaagacccgccgctgcacctaagctggaggacaaatcagccagcccagggctccccaagggcgagaaagaacagcaggaggcaatcgaacacattgatgaggtgcagaacgaaatcgaccggctgaatgagcaggccagcgaggaaattctcaaggtcgagcagaagtacaacaaactgcggcagccattctttcagaagcgcagtgagctgatcgctaaaattcctaacttctgggtgacaacatttgtcaatcacccacaggtgtctgcactgctcggcgaggaagatgaggaagccctgcattacctcacacgagtggaggtcactgagttcgaagacatcaagtccggatacaggattgatttctattttgacgagaacccctatttcgaaaataaggtgctgtctaaagagtttcatctcaacgagtccggcgatcctagctccaagtctaccgagatcaagtggaaaagtggaaaggacctgaccaaaagatctagtcagacacagaataaggcatccaggaaaagacagcacgaggaaccagagtcattctttacttggtttaccgatcatagcgacgccggcgctgatgagctgggagaagtgatcaaggacgatatttggcccaatcctctgcagtactatctcgtccccgacatggacgatgaggaaggggaggccgaagacgatgacgatgacgatgaggaagaggaaggtctggaggatatcgacgaggaaggggatgaggacgaaggcgaggaagacgatgacgaggatgaaggcgaggaaggagaggaagacgagggcgaagatgacgaattc

SEQ ID NO: 309 - DNA, 411 bp, synthetic construct
  source 1..411: mol_type = other DNA
gccaccatggctagcagccccaagaaaaaacggaaagtggaggcatcaatgaaggagggagaaaacaacaaacccagggagaaaagtgaagggaataagagaaaaagctccttctctaacagtgcagacgatatcaagtccaagaaaaagcgggagcagtctaatgacattgctaggggcttcgagagaggactggagccagaaaaaatcattggggcaaccgacagctgcggcgatctgatgtttctcatgaaatggaaggacacagatgaggccgacctggtgctcgccaaagaagctaacgtgaagtgtccccagatcgtcattgctttttacgaggaaaggctcacctggcacgcatatcctgaggatgccgaaaacaaggagaaggaatcagctaagagcgaattc

SEQ ID NO: 310 - DNA, 954 bp, synthetic construct
  source 1..954: mol_type = other DNA
gccaccatggctagctcccctaaaaagaagcgaaaggtcgaagccagtatgcccctccagattgtccaccacccagattacgatgccggatttgccaccaaccaccggttccctatgtctaagtatccactgctcatggaggctctgcgagcaaggggactcgcatcccctgatgccctgaacaccacagaacccgcacctgcctcttggctgaagctcgcccatgccgctgactacgtggatcaggtcatcagctgctccgtgccagagaaaatcgagagagaaattggttttccagtgggaccccgggtcagcctgcgagcacagctcgctactggaggaaccatcctggcagcacgactggccctccgacacgggattgcttgcaatactgcagggggtagtcaccatgcaaggagagcccagggagctgggttctgtacctttaacgatgtggctgtcgcatcactggtgctgctcgacgaaggcgctgcacagaatatcctggtggtggacctggacgtgcaccagggtgacggaaccgctgatattctgtcagacgagcccggtgtgttcaccttcagcatgcatggggaaaggaactaccccgtcagaaaaatcgcaagcgacctggatattgccctccctgatggaacaggggacgcagcttatctgcggcgcctcgccactatcctgcctgagctctccgccagagctcggtgggacattgtgttctacaacgctggcgtggatgtccacgcagaggacaggctgggaagactggctctctctaatggcggactgcgcgcccgagatgaaatggtcatcggccatttccgggctctgggaatcccagtgtgtggggtcattgggggtggctactctacagacgtgccagcactggccagtcgccatgcaattctgtttgaggtcgccagtacctatgctgaattc

SEQ ID NO: 311 - DNA, 708 bp, synthetic construct
  source 1..708: mol_type = other DNA
gccaccatggctagctcccccaaaaagaaacgcaaggtggaggcatctgctcgctatctcggtaacactgtcgatctgtcatcattcgatttccgcactggcaagatgatgccttctaaactgcagaagaacaaacagaggctgagaaatgacccactcaaccagaataagggaaaacccgatctgaacaccacactccctatccggcagacagctagtattttcaagcagcctgtgactaaagtcaccaaccacccatccaataaggtgaaatctgacccacagaggatgaatgagcagcccagacagctgttttgggaaaagcgcctgcagggtctctctgcaagtgatgtgacagagcagatcattaagactatggaactgccaaaaggactccagggagtgggacctgggtctaacgacgagactctgctctcagctgtcgcaagcgcactgcataccagctccgcacccatcacaggacaggtgagtgccgctgtcgagaagaacccagccgtgtggctgaatacttcacagcccctctgcaaggctttcatcgtcaccgacgaggatattcggaagcaggaggaacgcgtgcagcaggtccgaaaaatcctggaagacgctctcatggcagatattctgagcagagcagccgacaccgaggaaatggatattgagatggactccggggatgaagccgaattc

SEQ ID NO: 312 - DNA, 927 bp, synthetic construct
  source 1..927: mol_type = other DNA
gccaccatggctagcagccccaagaagaaaagaaaagtggaagcaagcaccgagatgagcgtcagaaaaatcgccgcacacatgaaatcaaacccaaatgccaaagtgatcttcatggtcggagcaggtatcagcacctcctgcggcatccccgactttcgatctccaggcacaggactgtaccacaacctcgctaggctgaagctcccatatcccgaggcagtgttcgacgtcgatttctttcagagtgatcctctgccattttacacactggctaaagagctctatcccggcaacttcaggccttcaaagtttcattacctgctcaaactgttccaggacaaggatgtgctcaaacgggtctatactcagaatatcgacaccctggagcgacaggcaggagtgaaggacgatctgatcattgaagcccacggaagctttgctcactgccattgtattgggtgcggtaaagtgtacccccctcaggtcttcaagtccaaactggcagagcatcccatcaaggactttgtgaaatgcgatgtctgtggggaactggtgaagccagccattgtcttctttggcgaggacctgcccgattctttcagtgaaacttggctgaatgactccgagtggctcagagaaaagatcaccacatctggcaaacacccccagcagcctctggtcatcgtggtcggaacctcactcgcagtgtaccctttcgccagcctgccagaggaaatccccaggaaggtgaaaagagtcctgtgtaacctggagacagtgggcgactttaaggccaacaagcggccaactgacctgatcgtgcatcagtattccgatgagttcgctgaacagctggtggaggaactcgggtggcaggaggattttgaaaagattctgaccgctcagggcggaatgggtgaattc

SEQ ID NO: 313 - DNA, 921 bp, synthetic construct
  source 1..921: mol_type = other DNA
gccaccatggctagctcaccaaagaagaaacgaaaagtggaagcaagtatgtctgtcaactacgcagcaggtctcagcccctacgccgataaaggcaaatgtggactgccagagatcttcgacccccctgaggaactggagcgcaaagtgtgggaactggcccgactcgtctggcagagctcctctgtggtcttccacacaggggccggtatcagtactgcttcaggcattcctgactttcggggcccacatggagtgtggacaatggaggaacgcggactggctcctaagttcgataccacatttgagagcgcaagaccaactcagacccacatggcactggtgcagctcgaacgagtcggactgctccgctttctggtgtcacagaacgtggacggcctgcacgtgcgatctggattccccagggataaactggccgagctccatggtaatatgtttgtggaggaatgcgctaagtgtaaaactcagtacgtccgagacaccgtggtcgggacaatgggtctcaaggcaactgggaggctgtgcaccgtggcaaaagctcgggggctgcgagcatgtcgaggcgagctccgcgataccatcctggactgggaagatagcctgccagacagggatctggcactcgccgacgaggccagcaggaacgcagatctgtccatcacactcgggacttctctgcagattagacccagtggcaacctgcctctcgctaccaagaggagaggcggacggctcgtgatcgtcaatctgcagcctacaaaacacgacagacatgcagatctgcggattcacggctatgtggacgaagtcatgaccaggctgatgaagcatctgggcctggagattccagcttgggatggacccagggtgctggaaagagcactgccacccctcgaattc

SEQ ID NO: 314 - DNA, 825 bp, synthetic construct
  source 1..825: mol_type = other DNA
gccaccatggctagcagccccaagaagaagagaaaggtcgaagcctcaatggtcggagcaggtatcagcacaccctcaggtattccagattttaggagccctggctctggactgtactccaacctccagcagtacgatctgccctatcctgaggctatctttgaactgcccttctttttccacaatccaaagccctttttcaccctggcaaaagagctctaccctggcaactataagccaaatgtgacacactacttcctgagactgctccatgataaaggactgctcctgcggctgtatactcagaacatcgacggcctggagcgcgtctcaggtattcctgccagcaagctggtggaagctcacgggacctttgccagcgctacctgcacagtgtgtcagcgacctttcccaggcgaggacatcagggcagatgtgatggcagaccgagtcccacgatgcccagtgtgcaccggcgtggtcaaacctgacattgtgtttttcggagaacccctgcctcagcggtttctcctgcatgtggtcgatttcccaatggccgacctcctgctcatcctgggcactagcctggaggtggaaccatttgcttctctgaccgaggcagtgcgaagctccgtcccaaggctgctcattaatagagatctggtcggacccctcgcatggcaccctaggagtagagatgtggcccagctgggcgacgtggtccatggagtggagtccctggtcgaactgctcggatggacagaggaaatgcgggacctggtgcagagagaaactgggaagctggacggtccagataaagaattc

SEQ ID NO: 315 - DNA, 1095 bp, synthetic construct
  source 1..1095: mol_type = other DNA
gccaccatggctagctcaccaaagaaaaaacggaaagtcgaagcctcaatgctccacacaacccagctctaccagcacgtccctgaaaccagatggcctatcgtgtactcccctcggtataacatcaccttcatggggctggagaagctccacccatttgacgccggcaagtggggaaaagtgattaatttcctgaaggaggaaaaactgctctctgacagtatgctggtggaggctcgcgaagcatccgaggaagatctgctcgtggtccatacaaggagatatctgaacgagctcaagtggtcttttgccgtcgctaccatcacagaaattccccctgtgatcttcctgccaaattttctcgtccagaggaaggtgctgagaccactccgaactcagaccggaggaactatcatggcaggcaaactggccgtcgagaggggatgggccattaacgtggggggtggcttccaccattgcagctccgacagaggagggggtttttgtgcatacgccgatatcaccctggctattaagttcctctttgagcgggtggaaggaatcagtcgcgccacaatcattgacctggatgctcaccagggcaacggacatgagcgagacttcatggacgataaaagggtctacatcatggacgtgtataatagacacatctacccaggcgatcggtttgccaagcaggctatccggcgcaaagtcgagctggaatggggaactgaggacgatgaatatctggacaaggtggagagaaacatcaagaaatctctgcaggaacatctccccgatgtggtcgtgtataacgctgggaccgacattctggagggcgacaggctgggcggactctcaatcagccccgcagggattgtgaagcgagatgaactggtcttccgcatggtgcgaggtcgaagggtccctatcctgatggtgacatcagggggttatcagaaaaggactgctagaatcattgcagacagcatcctgaacctctttgggctgggtctcattggccctgagtccccatctgtcagtgcacagaacagcgatacaccactgctcccaccagcagtgcctgaattc

SEQ ID NO: 316 - DNA, 2262 bp, synthetic construct
  source 1..2262: mol_type = other DNA
gccaccatgggccagactgggaagaaatctgagaagggaccagtttgttggcggaagcgtgtaaaatcagagtacatgcgactgagacagctcaagaggttcagacgagctgatgaagtaaagagtatgtttagttccaatcgtcagaaaattttggaaagaacggaaatcttaaaccaagaatggaaacagcgaaggatacagcctgtgcacatcctgacttctgtgagctcattgcgcgggactagggagtgttcggtgaccagtgacttggattttccaacacaagtcatcccattaaagactctgaatgcagttgcttcagtacccataatgtattcttggtctcccctacagcagaattttatggtggaagatgaaactgttttacataacattccttatatgggagatgaagttttagatcaggatggtactttcattgaagaactaataaaaaattatgatgggaaagtacacggggatagagaatgtgggtttataaatgatgaaatttttgtggagttggtgaatgcccttggtcaatataatgatgatgacgatgatgatgatggagacgatcctgaagaaagagaagaaaagcagaaagatctggaggatcaccgagatgataaagaaagccgcccacctcggaaatttccttctgataaaatttttgaagccatttcctcaatgtttccagataagggcacagcagaagaactaaaggaaaaatataaagaactcaccgaacagcagctcccaggcgcacttcctcctgaatgtacccccaacatagatggaccaaatgctaaatctgttcagagagagcaaagcttacactcctttcatacgcttttctgtaggcgatgttttaaatatgactgcttcctacatcgtaagtgcaattattcttttcatgcaacacccaacacttataagcggaagaacacagaaacagctctagacaacaaaccttgtggaccacagtgttaccagcatttggagggagcaaaggagtttgctgctgctctcaccgctgagcggataaagaccccaccaaaacgtccaggaggccgcagaagaggacggcttcccaataacagtagcaggcccagcacccccaccattaatgtgctggaatcaaaggatacagacagtgatagggaagcagggactgaaacggggggagagaacaatgataaagaagaagaagagaagaaagatgaaacttcgagctcctctgaagcaaattctcggtgtcaaacaccaataaagatgaagccaaatattgaacctcctgagaatgtggagtggagtggtgctgaagcctcaatgtttagagtcctcattggcacttactatgacaatttctgtgccattgctaggttaattgggaccaaaacatgtagacaggtgtatgagtttagagtcaaagaatctagcatcatagctccagctcccgctgaggatgtggatactcctccaaggaaaaagaagaggaaacaccggttgtgggctgcacactgcagaaagatacagctgaaaaaggacggctcctctaaccatgtttacaactatcaaccctgtgatcatccacggcagccttgtgacagttcgtgcccttgtgtgatagcacaaaatttttgtgaaaagttttgtcaatgtagttcagagtgtcaaaaccgctttccgggatgccgctgcaaagcacagtgcaacaccaagcagtgcccgtgctacctggctgtccgagagtgtgaccctgacctctgtcttacttgtggagccgctgaccattgggacagtaaaaatgtgtcctgcaagaactgcagtattcagcggggctccaaaaagcatctattgctggcaccatctgacgtggcaggctgggggatttttatcaaagatcctgtgcagaaaaatgaattcatctcagaatactgtggagagattatttctcaagatgaagctgacagaagagggaaagtgtatgataaatacatgtgcagctttctgttcaacttgaacaatgattttgtggtggatgcaacccgcaagggtaacaaaattcgttttgcaaatcattcggtaaatccaaactgctatgcaaaagttatgatggttaacggtgatcacaggataggtatttttgccaagagagccatccagactggcgaagagctgttttttgattacagatacagccaggctgatgccctgaagtatgtcggcatcgaaagagaaatggaaatcccttga

SEQ ID NO: 317 - DNA, 2742 bp, synthetic construct
  source 1..2742: mol_type = other DNA
gccaccatgcccgccatgccctccagcggccccggggacaccagcagctctgctgcggagcgggaggaggaccgaaaggacggagaggagcaggaggagccgcgtggcaaggaggagcgccaagagcccagcaccacggcacggaaggtggggcggcctgggaggaagcgcaagcaccccccggtggaaagcggtgacacgccaaaggaccctgcggtgatctccaagtccccatccatggcccaggactcaggcgcctcagagctattacccaatggggacttggagaagcggagtgagccccagccagaggaggggagccctgctggggggcagaagggcggggccccagcagagggagagggtgcagctgagaccctgcctgaagcctcaagagcagtggaaaatggctgctgcacccccaaggagggccgaggagcccctgcagaagcgggcaaagaacagaaggagaccaacatcgaatccatgaaaatggagggctcccggggccggctgcggggtggcttgggctgggagtccagcctccgtcagcggcccatgccgaggctcaccttccaggcgggggacccctactacatcagcaagcgcaagcgggacgagtggctggcacgctggaaaagggaggctgagaagaaagccaaggtcattgcaggaatgaatgctgtggaagaaaaccaggggcccggggagtctcagaaggtggaggaggccagccctcctgctgtgcagcagcccactgaccccgcatcccccactgtggctaccacgcctgagcccgtggggtccgatgctggggacaagaatgccaccaaagcaggcgatgacgagccagagtacgaggacggccggggctttggcattggggagctggtgtgggggaaactgcggggcttctcctggtggccaggccgcattgtgtcttggtggatgacgggccggagccgagcagctgaaggcacccgctgggtcatgtggttcggagacggcaaattctcagtggtgtgtgttgagaagctgatgccgctgagctcgttttgcagtgcgttccaccaggccacgtacaacaagcagcccatgtaccgcaaagccatctacgaggtcctgcaggtggccagcagccgcgcggggaagctgttcccggtgtgccacgacagcgatgagagtgacactgccaaggccgtggaggtgcagaacaagcccatgattgaatgggccctggggggcttccagccttctggccctaagggcctggagccaccagaagaagagaagaatccctacaaagaagtgtacacggacatgtgggtggaacctgaggcagctgcctacgcaccacctccaccagccaaaaagccccggaagagcacagcggagaagcccaaggtcaaggagattattgatgagcgcacaagagagcggctggtgtacgaggtgcggcagaagtgccggaacattgaggacatctgcatctcctgtgggagcctcaatgttaccctggaacaccccctcttcgttggaggaatgtgccaaaactgcaagaactgctttctggagtgtgcgtaccagtacgacgacgacggctaccagtcctactgcaccatctgctgtgggggccgtgaggtgctcatgtgcggaaacaacaactgctgcaggtgcttttgcgtggagtgtgtggacctcttggtggggccgggggctgcccaggcagccattaaggaagacccctggaactgctacatgtgcgggcacaagggtacctacgggctgctgcggcggcgagaggactggccctcccggctccagatgttcttcgctaataaccacgaccaggaatttgaccctccaaaggtttacccacctgtcccagctgagaagaggaagcccatccgggtgctgtctctctttgatggaatcgctacagggctcctggtgctgaaggacttgggcattcaggtggaccgctacattgcctcggaggtgtgtgaggactccatcacggtgggcatggtgcggcaccaggggaagatcatgtacgtcggggacgtccgcagcgtcacacagaagcatatccaggagtggggcccattcgatctggtgattgggggcagtccctgcaatgacctctccatcgtcaaccctgctcgcaagggcctctacgagggcactggccggctcttctttgagttctaccgcctcctgcatgatgcgcggcccaaggagggagatgatcgccccttcttctggctctttgagaatgtggtggccatgggcgttagtgacaagagggacatctcgcgatttctcgagtccaaccctgtgatgattgatgccaaagaagtgtcagctgcacacagggcccgctacttctggggtaaccttcccggtatgaacaggccgttggcatccactgtgaatgataagctggagctgcaggagtgtctggagcatggcaggatagccaagttcagcaaagtgaggaccattactacgaggtcaaactccataaagcagggcaaagaccagcattttcctgtcttcatgaatgagaaagaggacatcttatggtgcactgaaatggaaagggtatttggtttcccagtccactatactgacgtctccaacatgagccgcttggcgaggcagagactgctgggccggtcatggagcgtgccagtcatccgccacctcttcgctccgctgaaggagtattttgcgtgtgtg

SEQ ID NO: 318 - DNA, 711 bp, synthetic construct
  source 1..711: mol_type = other DNA
gccaccatggctagctctcccaaaaagaagcgaaaggtcgaagcctctatgactaccaactccactcaggacacactgtatctcagcctccacggcggaatcgactccgccatcccataccccgtgaggagagtcgagcagctgctccagttctcttttctgcccgaactccagttccagaacgccgctgtgaaacagagaatccagcgcctgtgctatagagaggaaaagcggctggctgtcagctccctcgcaaagtggctgggccagctccacaaacagaggctgagagcaccaaagaacccccctgtggccatttgttggatcaatagttacgtgggctatggagtctttgcccgggagtctattcccgcttggagttacatcggcgaatataccggcatcctgcggcgccgacaggctctgtggctcgacgagaacgattactgcttccgctatcctgtgccacgctactcattccgatattttaccatcgacagcgggatgcagggtaacgtcacaaggttcatcaatcactccgataaccctaatctggaggcaatcggggccttcgaaaacggtatcttccatatcatcatcagggccatcaaggatatcctgcccggggaggaactctgttaccactatggacctctgtactggaagcatcgaaagaaaagggaggagttcgtgccacaggaggaagaattc

SEQ ID NO: 319 - DNA, 780 bp, synthetic construct
  source 1..780: mol_type = other DNA
gccaccatggctagctccccaaagaaaaagcggaaagtggaagcctcaatggagaaacctcgggtcctggtgctgactggtgctggtattagtgctgaaagcggcattcgcacattccgagccgctgacggactgtgggaggaacacagggtggaggatgtcgccactcccgaaggattcgacagagatcctgagctggtgcaggcattttacaacgccaggagacggcagctccagcagccagaaatccagccaaatgcagcacacctggccctcgctaaactgcaggacgccctcggcgatcggtttctgctcgtgactcagaacattgacaatctgcatgagcgcgctgggaacaccaatgtgatccacatgcatggtgaactgctcaaagtgcgatgcagccagtccggacaggtgctggactggaccggcgacgtcacacccgaggataagtgtcactgctgtcagttcccagcacctctgcgaccacatgtggtctggtttggcgagatgcccctgggaatggacgaaatctacatggctctctctatggcagatatcttcattgctatcggcaccagtggacacgtgtatcctgctgcaggctttgtccatgaggcaaaactgcacggagcccatacagtggagctgaacctcgaaccatcacaggtcgggaatgagttcgctgaaaagtactatggtcctgcaagccaggtggtcccagagtttgtggaaaagctgctcaaagggctgaaggccggttctatcgctgaattc

SEQ ID NO: 320 - DNA, 855 bp, synthetic construct
  source 1..855: mol_type = other DNA
gccaccatggctagcagccctaaaaagaagaggaaggtggaggcaagcgacatttcaggaggtctggagttcaaaggaatccccgcaaccaatagagtggatgactcccccgtgtctcctaccagtggattcacatatatcaagtccctgatcattgagcctaatgtcatcattccaaaaagctccacaggctgcaactgtcgaggatcatgcactgacagcaagaaatgcgcatgtgccaagctgaacggcggaaatttcccctacgtggacctgaatgatggccgcctcattgagagcagggacgtggtctttgaatgcggaccccactgcggctgtggacctaagtgtgtgaatcgcactagccagaaacgactgaggttcaacctcgaagtgtttcggtccgctaagaaaggctgggcagtccgctcctgggagtatatcccagccgggtctcccgtgtgcgaatacattggtgtggtcaggagaactgctgacgtcgataccatcagcgacaatgagtatatcttcgaaattgattgtcagcagaccatgcagggactgggcggtaggcagcggcgcctcagagatgtggctgtcccaatgaacaatggtgtgagccagtctagtgaggacgaaaacgcccccgagttttgtatcgatgctgggagtacaggcaacttcgcaaggttcatcaatcactcatgcgaacctaacctgttcgtgcagtgtgtcctctcaagccatcaggacatcagactggcacgggtggtcctctttgccgctgataacatttctccaatgcaggagctgacatacgactatggctacgccctggatagtgtgcatgaattc

SEQ ID NO: 321 - DNA, 687 bp, synthetic construct
  source 1..687: mol_type = other DNA
gccaccatggctagcagccctaagaagaagcggaaagtggaagcctcaatggagttttggggtatcgaagtgaagagcggcaagcccgtgacagtgacaccagaggaaggcatcctgattcacgtgtcacaggccagcctcggcgaatgcaagaacaagaaaggagagttcgtgcctctgcatgtgaaagtcgggaaccagaatctggtcctcggtactctctctaccgagaatatcccacagctgttctgtgacctcgtgttcgataaggaatttgagctgagtcacacctgggggaagggttcagtgtactttgtcgggtataaaacacctaacattgagccacagggttactccgaggaagaagaggaggaagaggaagaggtgccagctggaaatgccgctaaggctgtcgcaaaacccaaggccaaacctgctgaagtgaagcccgcagtggacgatgaagaggacgagtctgacagtgatggcatggatgaagacgattccgacggagaggattctgaagaggaagagcccacccctaagaaacccgcaagctccaagaaaagggccaacgagaccacaccaaaggcccccgtgagcgcaaagaaagccaaggtggctgtcacacctcagaaaactgacgagaagaaaaagggcggaaaggcagccaatcagtccgaattc

SEQ ID NO: 322 - DNA, 1029 bp, synthetic construct
  source 1..1029: mol_type = other DNA
gccaccatggctagcagccctaagaagaagaggaaggtggaagcaagtatgtcaagagtggtcaaacccaaagtcgcaagcatggaagagatggcagcatttcacaccgacgcttacctgcagcacctccataaggtgtctgaggaaggcgataacgacgatccagagacactggaatacggcctcggatatgactgccccatcactgagggaatctacgattatgccgctgcagtgggcggagcaactctcaccgccgctgagcagctgatcgaagggaaaacaagaattgccgtcaactggccagggggttggcaccatgctaagaaagacgaagcaagcggattctgttacctcaatgatgctgtgctgggcatcctgaagctccgggagaaatttgaccgcgtgctctatgtggacatggatctgcaccatggggacggtgtggaagatgcattctcttttaccagtaaagtgatgacagtctcactgcataaattcagccccggcttctttcctggcaccggagacgtgtccgatatcgggctgggcaagggccggtactattctatcaacgtccccctgcaggacggtattcaggacgataagtactatcagatctgcgagggcgtgctgaaagaagtcttcaccaccttcaaccctgaggcagtggtcctgcagctcggtgcagacaccattgccggcgatcctatgtgcagctttaatatgacaccagagggaatcgggaagtgtctgaaatacgtgctccagtggcagctgcctacactgattctcggcggagggggctaccacctgccaaatactgcccgatgctggacatatctgactgctctcattgtgggaaggactctgagctccgagatccccgaccatgagttctttaccgaatacgggcctgattatgtgctggaaatcactccaagttgtaggcccgacagaaacgatacccagaaggtccaggagatcctccagtcaattaagggaaatctgaaaagggtggtcgaattc

SEQ ID NO: 323 - DNA, 966 bp, synthetic construct
  source 1..966: mol_type = other DNA
gccaccatggctagctcaccaaaaaagaagagaaaagtggaagcaagcgccagcagaaggacaggggagttcctcagagacgcccaggcaccaagtagatggctgaagcggtctaaaacaggccaggacgatggagctttttgcctggagacttggctcgcaggagcaggtgacgatgcagctggaggagagaggggaagagatcgagaaggtgcagccgacaaggccaaacagcgagaggaaaggagacagaaggagctggaggaaaggtttgaggaaatgaaggtggagttcgaggaaaaagcccagagaatgattgctcggcgcgctgcactgactggcgagatctactctgatggcaagggaagtaagaaaccccgggtccctagcctgccagagaacgacgatgacgctctcattgagatcattatcgaccctgaacagggaatcctgaagtggccactcagcgtgatgtccattcgccagcgaaccgtcatctaccaggagtgcctgcgaagggatctcactgcatgtattcacctgaccaaggtgccagggaaaggtcgcgccgtctttgccgctgacacaatcctgaaggatgacttcgtggtcgagtataaaggcgaactctgtagtgagagagaagccagggagagagaacagcggtacaaccgctcaaaggtgcccatggggagcttcatgttctacttcaagaacggttcacgcatgatggctatcgatgcaacagacgagaagcaggacttcggacccgctcgactgattaaccactccagacggaaccccaatatgacccctagagcaatcacactgggggattttaactctgagcctcggctcattttcgtggcccgccgaaatatcgaaaagggcgaggaactgctcgtggactatggcgagagggaccccgacgtcatcaaagaacatccctggctgaatagcgaattc

SEQ ID NO: 324 - DNA, 1038 bp, synthetic construct
  source 1..1038: mol_type = other DNA
gccaccatggctagctcacccaaaaagaaaagaaaagtcgaggcatcctacaaagaaagcgtccacctggagacatacccaaaagaaagagccactgagggaatcgcaatggagattgactacgcctcttgcaagagactgggcagctcctaccgggctctgcctaagagttatcagcagccaaaatgcaccggaagaacacccctctgtaaggaggtgctgaacgacacctgggtcagcttcccttcatggagcgaagattccacctttgtgtctagtaagaaaacacagtacgaggaacacatctatcggtgtgaggacgaacgcttcgagctggatgtggtcctcgaaactaacctggccaccatccgggtgctggaggctattcagaagaaactgagtcgcctctcagctgaggaacaggcaaagtttcgactcgacaatacactgggcggaacttccgaagtgatccatcgaaaggctctgcagaggatctacgcagataaagccgctgacatcattgatgggctgaggaagaatccatctatcgcagtgcccattgtcctgaaaagactcaagatgaaagaggaagagtggagggaggcccagagaggcttcaacaaggtctggagggagcagaatgaaaaatactatctgaagagcctcgaccaccagggaatcaacttcaagcagaacgatactaaggtcctgcggtccaaatctctgctcaacgagatcgaatcaatctacgacgagcgccaggaacaggccaccgaagagaatgctggggtgcccgtcggtcctcatctgagtctcgcttatgaggacaagcagatcctcgaagatgcagccgctctgatcattcaccatgtgaagcgacagacaggcatccagaaagaggacaagtacaaaatcaagcagattatgcaccatttcattccagatctgctctttgcccagcgcggggacctgtccgatgtggaagaggaagaggaagaggaaatggacgtggatgaggcaactggtgccgtcgaattc

SEQ ID NO: 325 - DNA, 681 bp, synthetic construct
  source 1..681: mol_type = other DNA
gccaccatggctagctcccccaagaagaaaaggaaggtggaagcatcatcatgtgactcaaccaacgcagcaatcgcaaagcaggcactcaagaagcccatcaagggtaaacaggccccccgcaagaaagctcagggcaagactcagcagaaccgaaaactgaccgacttctaccctgtgaggagaagctcccggaagtcaaaagccgagctgcagagcgaggaacggaagcgcatcgatgagctcattgaaagcggcaaggaggaaggcatgaaaatcgacctgattgatggcaagggaagaggggtcatcgcaaccaaacagttctctcggggagactttgtggtcgagtatcacggggacctgatcgaaattacagatgccaagaaacgggaggcactctacgcacaggacccctccacaggatgctatatgtactatttccagtacctgtctaagacttattgtgtggatgctacccgcgaaacaaatcgactgggaaggctcatcaaccatagtaagtgcgggaattgtcagaccaaactccacgacatcgatggcgtcccacatctgatcctcattgcatccagggatattgccgctggcgaggaactgctctacgactatggcgatagatctaaggctagtattgaggcatttccctggctgaagcacgaattc

SEQ ID NO: 326 - DNA, 333 bp, synthetic construct
  source 1..333: mol_type = other DNA
gccaccatggctagcagtcctaagaagaagcggaaggtggaagccagtatgtcaaggcggaagcaggcaaagccccagcattttcagtcagacccagaagtcgcttccctccccaggagagacggcgataccgagaagggacagccatctcggcccacaaagagtaaagacgcacacgtgtgcgggaggtgctgtgccgagttctttgaactgtcagatctgctcctgcataagaaaagctgtactaagaaccagctcgtgctgatcgtcaatgaaagccctgcctccccagctaaaaccttcccccctggccctagtctgaacgacgaattc

SEQ ID NO: 327 - DNA, 912 bp, synthetic construct
  source 1..912: mol_type = other DNA
gccaccatggctagcagcccaaagaagaaacggaaggtggaagcctcagtgcaggtgaaaagggtgctggaaaaatcccccggcaaactcctcgtgaagatgcccttccaggcttcccctggcggaaaaggtgaagggggtggcgcaaccacatctgcccaggtcatggtcatcaagcgacctggaaggaaaagaaaggccgaggctgaccctcaggccattccaaagaaacggggacgcaagccagggtccgtggtcgcagctgcagcagctgaggctaagaaaaaggcagtgaaggaaagctccatccgcagtgtgcaggagactgtcctgcccatcaagaagaggaagactagggagaccgtgtccatcgaggtcaaagaagtggtcaagcccctgctcgtgtccaccctgggcgaaaaatctggaaaggggctcaaaacatgcaagtcacctggacggaaaagcaaggagtctagtccaaaggggcgctcaagctccgcttctagtccccctaaaaaggaacaccatcaccatcaccatcacgccgagtctcctaaggctcctatgccactgctcccaccacctccaccacctgagccacagtcaagcgaagaccccatcagcccacccgagcctcaggatctgtcctctagtatttgcaaagaggaaaagatgcccagagcaggcagcctggagagtgatggctgtccaaaagaacccgccaagacccagcctatggtggcagccgctgcaactaccaccacaaccacaactaccacagtggccgaaaaatacaagcatcgcggcgagggcgaacgaaaggacattgtgtcaagctccatgcccagacctaaccgggaggaaccagtcgatagtaggacacccgtgactgagagagtctcagaattc

SEQ ID NO: 328 - DNA, 261 bp, synthetic construct
  source 1..261: mol_type = other DNA
gccaccatggctagctcccccaagaaaaagagaaaggtggaagcaagtatgaacgggctgatggaggacccaatgaaagtctacaaggacaggcagtttatgaacgtgtggaccgaccacgagaaggaaatcttcaaggataagttcatccagcatcccaaaaatttcggcctgatcgccagctacctggagaggaagtccgtgcctgactgcgtcctgtactattacctcacaaagaaaaacgaaaattacaaagaattc

SEQ ID NO: 329 - DNA, 363 bp, synthetic construct; identical to SEQ ID NO: 303
  source 1..363: mol_type = other DNA

SEQ ID NO: 330 - DNA, 1290 bp, synthetic construct
  source 1..1290: mol_type = other DNA
gccaccatggccaagaccgtggcctatttctacgaccccgacgtgggcaacttccactacggagctggacaccctatgaagcctcatcgcctggcattgacccatagcctggtcctgcattacggtctctataagaagatgatcgtcttcaagccataccaggcctcccagcatgacatgtgccgcttccactccgaggactacattgacttcctgcagagagtcagccccaccaatatgcaaggcttcaccaagagtcttaatgccttcaacgtaggcgatgactgcccagtgtttcccgggctctttgagttctgctcgcgttacacaggcgcatctctgcaaggagcaacccagctgaacaacaagatctgtgatattgccattaactgggctggtggtctgcaccatgccaagaagtttgaggcctctggcttctgctatgtcaacgacattgtgattggcatcctggagctgctcaagtaccaccctcgggtgctctacattgacattgacatccaccatggtgacggggttcaagaagctttctacctcactgaccgggtcatgacggtgtccttccacaaatacggaaattacttcttccctggcacaggtgacatgtatgaagtcggggcagagagtggccgctactactgtctgaacgtgcccctgcgggatggcattgatgaccagagttacaagcaccttttccagccggttatcaaccaggtagtggacttctaccaacccacgtgcattgtgctccagtgtggagctgactctctgggctgtgatcgattgggctgctttaacctcagcatccgagggcatggggaatgcgttgaatatgtcaagagcttcaatatccctctactcgtgctgggtggtggtggttatactgtccgaaatgttgcccgctgctggacatatgagacatcgctgctggtagaagaggccattagtgaggagcttccctatagtgaatacttcgagtactttgccccagacttcacacttcatccagatgtcagcacccgcatcgagaatcagaactcacgccagtatctggaccagatccgccagacaatctttgaaaacctgaagatgctgaaccatgcacctagtgtccagattcatgacgtgcctgcagacctcctgacctatgacaggactgatgaggctgatgcagaggagaggggtcctgaggagaactatagcaggccagaggcacccaatgagttctatgatggagaccatgacaatgacaaggaaagcgatgtggagatt

SEQ ID NO: 331 - DNA, 405 bp, synthetic construct
  source 1..405: mol_type = other DNA
gccaccatgggctccggaatgaacattcagatgttgctcgaggctgctgattacctggagcgccgcgaacgggaagcggaacacggttacgctagtatgctgcctgggagcggcatgaatatccagatgctgctcgaggcggccgattatctcgaacgcagagagagagaagccgaacatggctacgcctctatgctgcctggctccgggatgaatatacagatgctcctggaagctgccgactatctggagcgaagagaaagggaggctgagcacgggtatgcaagtatgctccctggctccggtatgaatatccagatgctgctggaggccgctgactatcttgaacgccgagaaagggaagccgagcatggatatgcatccatgctgccttctaggtctgcc

SEQ ID NO: 332 - DNA, 2304 bp, synthetic construct
  source 1..2304: mol_type = other DNA
gccaccatgccggccatctttaaacccgaggagctacgccaggcacttatgccaactctagaagcactctatcgacaggacccagagtctttgccttttcgtcagcctgtagatcctcagctcctaggaatcccagattattttgatatagtgaagaatcctatggacctttctaccatcaaacgaaagctggacacagggcaatatcaagaaccctggcagtatgtggatgatgtctggcttatgttcaacaatgcgtggctatataatcgtaaaacgtcccgtgtatataaattttgcagtaaacttgcagaggtctttgaacaagaaattgaccctgtcatgcagtctcttggatattgctgtggacgaaagtatgagttctccccacagactttgtgctgttacggaaagcagctgtgtacaattcctcgtgatgcagcctactacagctatcagaataggtatcatttctgtgagaagtgtttcacagagatccagggcgagaatgtgaccctgggtgacgacccttcccaacctcagacgacaatttccaaggatcaatttgaaaagaagaaaaatgataccttagatcctgaaccttttgttgactgcaaagagtgtggccggaagatgcatcagatttgtgttctacactatgacatcatttggccttcaggttttgtgtgtgacaactgtttgaagaaaactggcagacctcggaaagaaaacaaattcagtgctaagaggctgcagaccacacgattgggaaaccacttagaagacagagtgaataagtttttgcggcgccagaatcaccctgaagctggggaggtttttgtcagagtggtggccagctcagacaagactgtggaggtcaagccgggaatgaagtcaaggtttgtggattctggagagatgtcggaatctttcccatatcgtaccaaagcactctttgcttttgaggagatcgatggagtcgatgtgtgcttttttgggatgcatgtgcaagaatacggctctgattgccccccaccaaatacaaggcgtgtatacatatcttatctggacagtattcatttcttccggccccgctgcctccggacagctgtttaccatgagatcctcatcggatatctcgagtatgtgaagaaattggggtatgtgacaggacatatttgggcctgtcccccaagtgaaggagatgactatatctttcattgccacccccctgaccagaaaatccccaaaccaaaacgactacaggagtggtacaagaagatgctggacaaggcgtttgcagagaggatcattaacgactataaggacatcttcaaacaagcgaacgaagacaggctcacgagtgccaaggagttgccctattttgaaggagatttctggcctaatgtgttggaagaaagcattaaggaactagaacaagaagaagaagaaaggaaaaaagaagagagtactgcagcgagtgagactcctgagggcagtcagggtgacagcaaaaatgcgaagaaaaagaacaacaagaagaccaacaaaaacaaaagcagcattagccgcgccaacaagaagaagcccagcatgcccaatgtttccaacgacctgtcgcagaagctgtatgccaccatggagaagcacaaggaggtattctttgtgattcatctgcatgctgggcctgttatcagcactcagccccccatcgtggaccctgatcctctgcttagctgtgacctcatggatgggcgagatgccttcctcaccctggccagagacaagcactgggaattctcttccttacgccgctccaaatggtccactctgtgcatgctggtggagctgcacacacagggccaggaccgctttgtttatacctgcaatgagtgcaaacaccatgtggaaacacgctggcactgcactgtgtgtgaggactatgacctttgtatcaattgctacaacacaaagagccacacccataagatggtgaagtgggggctaggcctagatgatgagggcagcagtcagggtgagccacagtccaagagcccccaggaatcccggcgtctcagcatccagcgctgcatccagtccctggtgcatgcctgccagtgtcgcaatgccaactgctcactgccgtcttgccagaagatgaagcgagtcgtgcagcacaccaagggctgcaagcgcaagactaatggaggatgcccagtgtgcaagcagctcattgctctttgctgctaccacgccaaacactgccaagaaaataaatgccctgtgcccttctgcctcaacatc

SEQ ID NO: 333 - DNA, 570 bp, synthetic construct
  source 1..570: mol_type = other DNA
gccaccatgaggcctcacaccttgaatagcaccagcacttcaaagtcatttcagagcacagtcactggagagctgaatgcaccctacagtaagcagtttgtccactccaagtcatcacagtaccggagaatgaagactgaatggaaatctaatgtgtatctggcccgatctcggatccagggactgggcctgtatgctgctagagacattgaaaaacacactatggtcatcgagtacattggaacaattattcgaaatgaggttgcaaaccggaaggagaagctttatgagtctcagaaccggggtgtgtacatgttccgcatggacaatgaccacgtgattgacgccacactcacaggagggcctgcaagatacatcaaccactcctgtgcccctaactgtgtggctgaagtcgtgacctttgagagaggacacaagattatcatcagctccaaccggaggatacagaaaggagaagagctctgctatgattataagtttgactttgaagatgaccagcacaagattccgtgtcactgtggagcggtgaactgccggaagtggatgaac

SEQ ID NO: 334 - DNA, 2877 bp, synthetic construct
  source 1..2877: mol_type = other DNA
gccaccatgaccccagtgaatgcaactgtgggaactgtaaacgcggcccctggcacggtgaacgccgcagcttctgctgtgaacgctaccgcaagtgcagttactgtgaccgccggagccgtcacagccgccagcggaggagtaactgccaccactggcacggtgacaatggccggcgccgtgatcgcaccgagcacaaagtgtaaacaaagggccagcgcaaacgaaaactcaaggttccaccccggttccatgccagtgatcgatgatcggcccgctgacgcggggtctggcgcgggattgagggtcaatacttccgagggtgtcgttctgttgagctactctgggcaaaagaccgaaggcccacaacggatttccgctaaaatctctcaaattccaccagcctctgcaatggacatcgagttccaacagtccgttagcaaaagtcaggtcaagccagattccgtgacggcttctcagccaccttctaaaggcccacaggcccccgccggctatgccaatgtagccacacacagcacactcgtgttgacagctcagacttacaacgccagccctgtgatctctagcgtgaaagcggatcgaccgtctctcgagaaaccggagccaatacacctctctgtaagcacacccgtcactcagggcggcacagtgaaggttttgacccagggaattaacaccccacctgttctggtccacaatcagctggtcctcactccctctatcgtgactactaataagaagctggcggacccagttaccctgaaaatcgagacaaaagtgctgcagcctgccaacctcgggagcactcttacgcctcatcacccaccggctctgccctccaagctccccaccgaggtcaatcatgttccctctggacctagtatcccggctgatcgcacggtcagtcatctggcggccgcaaagctggatgcacacagccccagaccaagtggtccgggtcccagctccttccccagggctagccacccctcctctactgcatctacagctctgtctactaatgccactgtcatgctggccgctggtataccggtccctcagtttattagctctattcatcctgagcagtctgttatcatgcctcctcacagcatcacacagaccgtgagtctctctcacctcagtcagggtgaggtcagaatgaacacaccgaccttgccttccatcacttactcaatcaggccagaagcactgcactcccccagggctcctcttcagcctcagcagattgaagtccgagcaccacagagagcgagcaccccccaacccgcacctgcgggcgtgcctgcactggccagccaacatcctcccgaggaggaggtgcattatcatttgcccgtggctcgcgccacagcaccggtccaaagcgaagtcctggtcatgcagagcgagtatcgcttgcatccctataccgtgccacgggacgttagaattatggtgcacccccatgtgactgctgtaagcgaacaaccccgggctgctgatggcgtggtgaaggtacctcccgcatctaaggccccccagcagccagggaaagaggctgccaagacgcctgacgcaaaggcagcccccaccccaacgcctgctcccgtccccgtgccggttcccctgccagctcccgctcctgctccccatggtgaagccaggatccttactgttacaccatccaaccaactgcaaggcttgccgctgacaccacccgtagtggtgacccacggagtacaaattgtgcacagttcaggtgaactgtttcaggaataccgatacggtgacattcggacttaccatccccctgctcagttgacccacacacagtttccagcggccagctctgtaggactcccatcacggactaagacagcagcccaaggacctccacccgagggggaacccctgcagcccccacaaccagtacagtctacgcagccagctcaaccagcccccccttgcccaccatctcagttggggcaacccgggcagcccccctctagcaaaatgccacaggtttctcaggaggcaaaaggcacacagacaggggtcgagcagccgcgattgcccgctggtcccgccaaccgacctccggaaccccacacacaagtgcagcgggcccaagctgaaaccggaccgactagcttcccttcccctgttagtgtgtccatgaaaccagaccttcctgtttcattgcccacccagactgcacccaagcagcccctgtttgttccaacgaccagtggccctagcacaccacccggtcttgtcctgccgcatacagaatttcagcctgctccaaagcaagactcctcccctcatctcacttctcagaggcccgtcgacatggtccagctgctcaagaaataccctattgtgtggcaaggacttctcgccctgaagaacgataccgccgccgtacagctgcattttgtgagtggaaacaacgtccttgcccataggtcccttcctctgtctgaaggagggccacccctcagaatcgcacagcgcatgagactcgaagccacgcagctggagggcgtcgcccgccggatgacggtggagactgattactgtctgcttctggccctcccatgcggacgagatcaggaagacgtggtctcccagaccgagtcactcaaagccgccttcataacatatctgcaggcgaaacaggcggccggaatcataaatgtcccaaatccaggcagcaatcagcctgcctatgtactgcagatattccctccctgcgagttctcagagtcacatctgtcaaggcttgctccagacctgttggccagcatttccaatattagcccacacctcatgatcgtgattgcaagtgtc

SEQ ID NO: 335 - DNA, 1743 bp, synthetic construct
  source 1..1743: mol_type = other DNA
gccaccatggaagatggtctctccagccagctgaaaagtgatcctgttgatcccgataaggagccagagaaggaggatgtcagcgcaagtggcccgtctcccgaggccactcagttggctaagcagatggagcttgagcaggcagtagagcacattgctaaactcgctgaagcaagcgcatctgcggcctacaaagccgatgcccctgaaggacttgcaccagaggacagagacaaaccggcacatcaagcctcagagacagagctggctgctgccattggctctataatcaacgatatttcaggtgaaccagaaaatttcccagccccacccccgtacccgggagaaagtcagacggacctgcagccaccagctggagcacaggctctccagccaagtgaggagggaatggagactgacgaggctgtcagcggtatcctggagacagaggctgccacggaatcatccaggccacccgtcaacgccccggacccatctgctggcccaaccgatactaaagaagccagagggaacagcagcgaaaccagccattccgtgcctgaagccaagggaagcaaagaagttgaagttactctggtgcggaaagacaaaggccggcaaaagactacccgctcccggcggaagcggaatactaataaaaaggtggtcgcccccgttgagtcacatgtgccagagagcaaccaggctcagggtgaatccccggccgcaaatgaggggacaaccgtccaacacccggaggccccccaggaagagaagcaatctgagaaaccccacagtacccctcctcaatcctgcacgtctgatctgtctaaaattcctagtactgaaaactccagccaggaaatttctgtcgaagaaagaacaccaactaaggcgagtgtgccccccgacctgccgccgcctccgcagccggccccggtggacgaggaacctcaggccagatttagggtgcactctatcattgagagtgacccagttaccccgccatcagatccatccattccaatacctacacttccatctgtgaccgccgcgaagctgtcacctccggtggcatccggcggcataccccaccagtccccacctacaaaagttaccgagtggatcacaagacaggaggaaccgcgagcacagtctaccccctccccagccctgccccccgacacgaaagcctctgacgtggacaccagttcatctacgctgagaaaaattttgatggatccgaagtacgtctctgccaccagcgtcacttctacaagcgtgaccactgcgatcgcagagcccgtgagcgcggcaccatgccttcatgaagccccgcccccccccgtcgattctaaaaagccactcgaggagaagactgcgcccccagtgacaaacaattcagaaattcaggcgtcagaggtgctggtcgctgccgacaaggagaaggtcgcaccagtgatagccccaaagataacaagcgttatcagtcgcatgccagtttctatcgatctggagaatagtcagaagatcaccctggccaagcctgccccacagaccctcactggtctcgtctccgccctgaccggcttggtgaatgtctctctcgtccctgtgaatgcactgaagggacctgttaagggcagcgttacgacattgaaatcactggtgagcacgcctgctggtcctgttaatgtgttgaagggccccgtgaacgtccttactggaccagtgaacgtgctg

SEQ ID NO: 336 - DNA, 2325 bp, synthetic construct
  source 1..2325: mol_type = other DNA
gccaccatggaacctggcaatggctccctcgatctcgggggggactcagccggcaggagcggagccggcctggagcaggaagctgctgctggcggcgacgaggaagaagaggaggaggaggaagaggaagaaggcatcagcgctttggatggcgatcaaatggagctgggagaagagaacggtgctgccggggccgcagacagcggccctatggaagaggaggaggctgcctccgaggacgaaaacggggacgaccaagggttccaggaaggcgaggacgagctgggcgacgaagaagagggcgccggggatgagaatgggcatggggaacagcagccgcaaccgcctgcgacccaacagcagcaaccacaacagcagagaggcgcagcaaaggaagccgccggtaaatcctctggccccactagtctgttcgcagtcactgtggccccaccaggtgcccggcagggccagcagcaggccgggggcaagaagaaggctgagggcggaggcggaggtggaagacctggagcccctgccgcaggcgatgggaagacagagcagaaaggcggcgataaaaagagaggggtgaagcggcccagggaagaccatggaagaggatatttcgaatatatagaggaaaataagtattccagggcaaaatcccctcaacctccggttgaggaggaagacgagcacttcgatgacacggttgtctgtttggacacctataattgcgacctccactttaagatctcacgggatagactcagcgcctctagtcttaccatggagagcttcgctttcctgtgggcaggtggtagggcctcttatggtgtaagcaaaggtaaagtgtgcttcgagatgaaagtgacagaaaagattcccgttcgccacctgtacaccaaggacatcgacatccacgaggtccgcattggttggtcccttactacatcaggcatgctgctcggagaggaagagttttcttatggttactcactgaagggaattaaaacttgcaattgcgagacagaggactatggcgagaagttcgacgagaacgacgtgatcacatgcttcgcgaacttcgaaagtgatgaggtcgaactctcttacgctaagaatggccaggaccttggtgtggcatttaaaatcagcaaagaggtcctggcagggcgccctttgtttccgcacgtcttgtgtcataattgcgccgttgagttcaatttcggccaaaaggagaaaccctatttccccattccggaggagtacactttcatccagaatgttcccctggaagaccgcgttagaggtccgaagggccccgaagagaaaaaagattgcgaagtggtgatgatgatcgggcttcctggtgctggtaagactacttgggtcaccaagcacgctgcagagaatccaggcaaatacaacatcttggggaccaacactatcatggacaagatgatggtcgcagggttcaagaagcaaatggccgacaccgggaaactgaacaccctcctgcagcgggctcctcagtgcctcgggaagtttatagagatcgcggctcgaaagaaaagaaatttcatcctggaccagaccaacgtgtctgctgccgcccagagaaggaagatgtgcctcttcgcaggcttccagcggaaagcagttgtcgtgtgtccaaaggatgaggattataagcagagaacacagaagaaggctgaagtggaaggcaaagatctgcctgaacacgccgtcctgaagatgaaaggaaactttaccttgcccgaggttgccgagtgtttcgacgagattacttacgtggagcttcaaaaggaggaggcacagaagctgctggagcaatacaaagaagagagtaagaaggccctgcctcccgagaaaaagcagaacactggctcaaagaagtctaataagaacaagtctggtaagaatcagtttaaccgcggtggcgggcataggggccggggtgggtttaatatgcgagggggaaactttcgaggaggagcgccaggcaaccgcggtggctataatcggcgaggtaacatgcctcagcggggcggaggcggaggaggttcaggtgggatcggctatccctaccctcgcgcccctgttttccccggaagaggtagctactcaaatagaggcaactacaatcggggggggatgccaaatcggggcaattataaccagaattttcgggggcggggtaacaataggggatataagaatcaatctcagggttacaaccagtggcaacagggccaattctggggccagaagccatggtcccagcactatcatcaggggtactat

SEQ ID NO: 337 - DNA, 639 bp, synthetic construct
  source 1..639: mol_type = other DNA
gccaccatgcccagcagaaaattcgcggatggagaggtagtacgcgggagatggcctggctcatcactctattacgaggtggaaattctcagtcacgacagcacttcccagctttataccgtcaagtataaagacggaacggagctggagttgaaggaaaacgacatcaaacctctgacatcttttcggcaaaggaaaggcgggagtacaagttcctctccttcccggagacgcggatcccggagtaggtcaagaagtcggtcccctggtcggcctccgaagagcgcacgccgctcagcatctgccagccatcaggcagacattaaggaggcaaggcgcgaggtagaagttaaactgactcctttgatccttaagcctttcgggaacagcatatcccgctacaatggagagccagaacacatcgaaaggaatgacgctccacataagaatactcaggaaaaatttagtctgtcccaagaaagttcatatatcgcgacacagtatagtctccggccgcgacgggaagaagttaaattgaaagagattgatagcaaggaagagaagtatgttgcgaaggagctcgctgtccggacgtttgaagtaacgcctattcgggccaaggatctggagtttggtgga

SEQ ID NO: 338 - DNA, 1851 bp, synthetic construct
  source 1..1851: mol_type = other DNA
gccaccatgcccagtcgcaaatttgccgatggcgaagtggtgcggggaagatggcccggaagttctctgtactatgaggtggaaatcctgagccacgattccaccagtcagctgtacaccgtcaagtataaagatggcaccgagctggaattgaaggagaatgatatcaagcctcttacatcttttcggcagagaaaggggggatcaacttctagctcccccagtcgccgacgcgggtcacggtccaggagtcgcagtcgcagccctggtagaccacccaagagcgctcgcagatccgcaagtgcaagccaccaggctgacataaaggaggcaagacgcgaggtggaggtgaagttgaccccactgattctcaaaccgttcgggaatagcataagtcgatataatggcgagcccgagcatatcgagcggaacgacgcccctcacaagaatacgcaggagaagttctccctctcccaagagtcctcctatatcgctacccagtatagccttaggccgaggcgggaggaggtcaagctgaaagagatagacagtaaagaggagaagtacgtggcgaaggaactcgcagtgagaactttcgaggtgacaccaatccgagccaaggatctggaattcgggggggttccgggagttttccttataatgtttggattgcccgtatttctgttcttgttgctgctgatgtgtaagcagaaggacccatctctgcttaatttcccccctccgcttcctgccctctacgaactctgggaaacccgagtcttcggagtctacctcctctggtttctcatccaagtgttgttttatttgctgcccataggaaaagttgtggagggaacacccctgatcgatggtcgcagactgaaatatagactgaacggcttttatgccttcatcctcaccagcgccgtcattgggaccagtctgttccagggagtggagtttcactacgtgtactcccactttttgcagtttgctttggcagctactgtcttctgtgtggtccttagtgtctatctttacatgaggtctcttaaagcccctcgcaacgacctctcaccagcttctagtggtaatgctgtgtacgattttttcatcggaagggagctgaatcctcgcatcgggacctttgacctgaagtacttctgcgagctgaggccgggtctgatcgggtgggtggttatcaacctggttatgcttttggcagagatgaagatacaggatagggccgtaccctccctggctatgatactcgtaaacagttttcagctcctgtatgtggtggacgccctttggaacgaagaggccttgctgacaactatggacatcatacacgacggctttggattcatgctggcattcggtgacctggtctgggtgccttttatatattctttccaggccttttacctggtatcacacccaaatgaggtttcttggcccatggctagccttatcatcgtccttaagctgtgcggatacgtaatcttcaggggcgccaactcacagaaaaatgcatttcgcaaaaatccatctgacccaaagctcgcccatcttaagaccattcacacatccaccgggaagaacctcctggtttccggttggtgggggtttgtccgccaccctaactacttgggcgacctcataatggcgctggcttggagtctcccctgtggattcaaccacattctgccctacttctacataatatattttaccatgcttctggtgcacagggaggcacgcgatgaataccattgcaagaaaaagtatggtgtagcgtgggagaaatactgtcagcgggtgccgtacaggattttcccgtacatatat

SEQ ID NO: 339 - DNA, 831 bp, synthetic construct
  source 1..831: mol_type = other DNA
gccaccatgggaaacttgatgatcagctttctgaagaaagatacgcagtcaattacactcgaagaactggccaagattatcaaaaagtgcaagcatgtcgtcgccctgacaggctctggcacaagcgcagagtccaatatccccagcttccgaggctcttcaaactctatctggagcaagtacgaccccagaatctacggaacaatttggggtttttggaagtatcccgagaaaatttgggaggtgataagagatatctcatcagattatgagatcgaaataaacaatggtcacgtggcccttagcaccctcgaaagcctgggttacctcaaaagcgtggttacccagaacgtcgacggactgcatgaggcatccgggaacactaaggtaatcagcctgcatggcaatgtgttcgaggccgtgtgctgcacgtgtaacaaaatagtgaagctcaacaaaatcatgcttcaaaagacatctcatttcatgcatcagctcccacctgagtgcccatgcggcgggatatttaagcccaatatcattctttttggagaggttgtctcttctgacctcctcaaagaagcggaagaagagatcgcaaaatgcgacctgctgctggtgattgggacctcatccacagtaagtacggcgaccaatctgtgccatttcgcctgcaagaagaaaaagaaaattgtggaaatcaatatcagcaagacctatatcaccaacaaaatgtcagactatcacgtatgtgcaaagtttagcgagttgaccaaggtggccaacatcctcaagggcagcagtgagaagaataaaaagattatggaattc

SEQ ID NO: 340 - DNA, 999 bp, synthetic construct
  source 1..999: mol_type = other DNA
gccaccatggcggccgctgcgaactcaggctcctcactgcccctgtttgactgccctacatgggctggtaagcctcccccaggtttgcacctcgacgtggtgaagggcgacaagctgatcgagaagctgataatcgatgagaaaaaatattatctcttcggtagaaatcctgatctctgtgactttactatcgatcatcagtcttgctcacgagtacacgccgctcttgtctaccacaaacacctcaaacgcgtctttctcatcgacctgaatagtacccacgggacatttcttggtcacattcggctcgagccacataaaccacagcagattcccatagactctacagtgagttttggggcttccacacgggcctacacgctgagagaaaagcctcagaccctgccatccgcagtgaagggcgatgaaaagatgggcggcgaggatgacgagctgaaaggactgcttgggctccccgaggaggagacggagctcgacaatctgaccgagtttaacacagcccataacaaaaggatctccacacttacaatagaagaggggaatctggacatccagcgacccaagcggaaaaggaaaaatagtagagtgacattctccgaagacgatgagatcataaatcctgaggatgtggatccatccgtgggacgcttccgaaacatggttcagacggctgtcgtgccggtcaagaagaaacgcgtggagggtccggggtctttggggttggaagaatcaggtagcagacgcatgcagaatttcgcattctctggaggactgtacggcggacttccaccgacccattcagaagccggaagtcagccccacgggattcatggtactgcactgatcggcggtctgcctatgccttacccaaacttggcacctgacgtggacctgactcccgtagtaccatcagccgtaaacatgaaccccgcccccaaccctgccgtctacaaccctgaagctgtgaatgaagagttt

SEQ ID NO: 341 - DNA, 1017 bp, synthetic construct
  source 1..1017: mol_type = other DNA
gccaccatggaaaacagagctctggacccgggcactagagactcctatggcgctacgtcacatctgccaaacaaaggagcactggcaaaggtgaagaacaactttaaagacctcatgtcaaaactcactgaaggtcagtacgtgctgtgtaggtggacggatgggctgtactatctcggtaaaatcaagagagtgtccagctccaagcagagctgcctggtcacattcgaggataattccaagtactgggtactgtggaaagacattcagcacgctggagttccaggcgaagaaccgaaatgtaacatttgtctggggaaaacgtctggtccgctgaacgaaattctcatctgtggtaaatgtgggctgggttaccaccagcagtgccatatccctatcgcagggagtgcggaccagcccctgcttactccctggttctgccgcaggtgtatctttgctctggccgtcagaaaggggggggccctgaaaaagggggccattgctcgcactttgcaggcggtaaagatggtgctgagctaccagcctgaagagctggaatgggatagcccgcaccgcaccaatcagcagcaatgctactgttactgtggcgggcccggagaatggtatctgcgcatgcttcagtgttatcggtgtcgacagtggtttcacgaggcttgtacacagtgccttaatgaacctatgatgttcggtgaccggttttacttgtttttttgtagtgtctgtaaccagggacctgggggaagtggtagcgactctagcgccgaaggcgcctcagtgcctgaaaggcctgacgaggggatcgatagtcacacgtttgagagcatcagcgaggatgatagctccctttcccacttgaagagcagtataactaattatttcggtgccgcggggcggttggcctgtggggaaaaataccaagtgctggcacggcgcgtcacacctgaaggaaaggtccaatatctggtagaatgggaggggacaacaccctacgaattc

SEQ ID NO: 342 - DNA, 369 bp, synthetic construct
  source 1..369: mol_type = other DNA
gccaccatgttcaatgatagagtgatagtcaagaagagccccctgggaggatacggggtgtttgcccgcaagagctttgagaagggtgagcttgttgaggagtgcctgtgcatcgtgcgccacaatgacgactgggggaccgccctggaggactacttgttttcacggaaaaatatgagtgcaatggcactcggcttcggtgccatctttaatcacagcaaggaccctaatgctcgccacgagctgactgccggacttaagcggatgcgcattttcactatcaagcctattgccataggagaagaaataacaatttcctatggagacgattattggctgtcacgaccgagactgacccagaatgagttt

SEQ ID NO: 343 - DNA, 738 bp, synthetic construct
  source 1..738: mol_type = other DNA
gccaccatgaaggtcgccgcgaaaaaacttgccacctcccgcatgcggaaagaccgcgcagctgctgcatccccttcctccgatatagaaaactctgagaaccccagctcacttgcttcccactcctccagctctggaagaatgaccccttcaaaaaatactcggagtcgcaaaggggtaagtgtgaaagatgtcagtaaccataaaatcacggaattctttcaggtcagaaggagtaaccggaagacctctaagcagatttccgatgaggctaaacatgccttgcgagacacggtgttgaagggaacaaatgaaagacttcttgaagtgtacaaggacgtggttaaaggaaggggaatcaggacgaaagtgaattttgagaagggtgatttcgtggtggaataccgcggtgttatgatggagtatagcgaggctaaagttatcgaggaacagtacagtaacgatgaggagatcgggagctatatgtattttttcgagcacaacaacaaaaagtggtgtatcgatgcaaccaaagaatctccatggaagggcagactcataaaccattctgtccttcgccccaacctcaaaacaaaagtggtagaaatcgatggtagtcatcacctcatcctggttgcacgcagacagattgcgcagggagaagagctcctgtacgattatggtgaccgcagcgccgagactatcgccaaaaatccctggctggttaacacagaattc

SEQ ID NO: 344 - DNA, 900 bp, synthetic construct
  source 1..900: mol_type = other DNA
gccaccatggtgcggacagagaaaatcatatgccgggacgtagccagagggtacgagaacgtacccattccgtgcgtaaacggcgtggacggcgaaccatgccctgaggactacaagtacataagcgagaattgtgagaccagtactatgaatattgatagaaacatcacacatctccagcattgtacctgtgttgatgattgttcctcttccaactgtctttgtggccaactcagcatcagatgttggtacgacaaggacggcaggctgcttcaagaattcaacaaaatcgaaccccccctgattttcgaatgcaatcaggcttgttcatgttggcggtcatgcaagaatcgggttgtgcaatccgggattaaagttcggttgcagttgtaccgcactgcaaagatggggtggggcgttcgggcactgcaaaccatcccgcagggaacctttatatgtgaatatgtgggagagctcatctcagatgctgaagccgacgtgcgcgaagacgactcctacctgtttgatctggataacaaggacggagaagtttactgtattgacgcccggtactacggcaacattagtagattcataaatcacctgtgtgatcccaacatcatccccgtacgcgtgtttatgctgcaccaggacctcagattcccacgaatcgccttcttcagtagcagggatattaggaccggggaagaacttggctttgactatggagatcggttctgggacatcaagtcaaagtatttcacctgccagtgtgggagcgagaaatgcaaacactctgctgaagccatagctctggagcagtctcgcctggctcgcctggacccacatcccgaactgctccctgacctgtccagcctgccgccaattaacaccgaattt

SEQ ID NO: 345 - DNA, 837 bp, synthetic construct
  source 1..837: mol_type = other DNA
gccaccatgtctagttctatggctgacttcagaaagtttttcgcgaaggctaaacacatcgtcatcatatccggggctggagtgtccgccgagtcaggcgtacctacctttcggggcgccggcggctactggcgcaaatggcaagcacaagacctcgccacaccgcttgcctttgcccataaccccagccgggtgtgggagttttatcactaccgaagggaagttatgggttccaaggagccaaacgcaggacatagagctatcgccgagtgtgaaactagacttggaaagcagggccggagggtggtcgtgattacacagaacatcgacgagttgcatcgcaaggcagggaccaagaacttgctggaaatacacggtagcttgtttaaaacaagatgcacctcatgtggtgtggtggccgagaactacaaaagcccaatttgtccagccctgtccggcaagggggctcctgagcccggtacacaggatgcgagcataccggtggaaaagctgccacgctgtgaggaggccggctgcggcggactcctccgcccccacgttgtctggttcggagagaatctggacccagctattctggaggaggtggatagagaactggcccattgcgacctgtgcctggtcgtcggcacgtcttcagtcgtgtacccagccgccatgtttgctcctcaggtcgccgccagaggcgtacccgtagccgaatttaacactgaaacgacaccagccacaaaccggtttcgctttcattttcaggggccttgcgggactacacttcctgaggcactggcctgccacgaaaacgagacagtgtctgaattc

SEQ ID NO: 346 - DNA, 981 bp, synthetic construct
  source 1..981: mol_type = other DNA
gccaccatgcgaagagtcgcttacttttacgatgctgacgtggggaactatgcatacggggctggtcaccccatgaagccacataggatcagaatggcccattcccttatcatgaactatggcctgtataaaaagatggaaatttaccgagccaagccggcaactaagcaagagatgtgccagttccacacagacgagtacatcgacttcttgtcccgcgtgacccctgacaacttggagatgtttaagagggagtcagtcaagtttaacgtgggtgatgattgtccagtgtttgatggcctgtacgaatactgctcaatttctgggggcggttctatggagggcgcggcccgattgaatcgcgggaagtgcgacgtcgcagttaattacgcaggaggactgcaccacgccaagaagtccgaggctagcggtttttgctacttgaacgatatcgtcctgggaatcatcgaactgctcaggtatcaccctcgagttctttatatagacattgacgtacatcacggcgacggcgtcgaagaggccttttacacaactgaccgggtcatgacttgtagcttccataaatacggagaattttttcctggaaccggcgagctgcgcgacatcggagtgggcgctggaaaaaactatgctgttaacgtacctctcagggatgggattgacgatgcaacctatcggtctgtgtttgaaccagtgattaagaagattatggagtggtaccagcctagcgcggtcgtcctgcaatgtgggggcgatagcctgtctggtgacagacttggctgttttaatctgagcatggaaggtcatgctaactgtgtaaactacgtgaagtctttcggaatcccaatgatggtggtaggcggaggcggctatacaatgaggaacgtggcccgcacatggtgctttgaaaccggcctgctgaacaatgtggtgctcgacaaagatctgccttatgagttt

SEQ ID NO: 347 - DNA, 675 bp, synthetic construct
  source 1..675: mol_type = other DNA
gccaccatgagcaacagctgggaggaaggatcttccggtagttcctctgacgaggaacatggcgggggcggaatgagagtgggccctcagtaccaggcagtggtgcctgactttgaccctgccaagctggctagacggtcccaggagcgagataaccttggcatgcttgtgtggagccctaatcagaatcttagcgaagctaagctggacgagtacattgcgattgcaaaagaaaagcacgggtacaacatggaacaagccctgggcatgcttttttggcacaagcacaatatagagaaaagtctggctgacttgcccaactttacgccattcccagatgagtggacagtcgaggacaaagtgctgttcgagcaggcctttagttttcacggaaaaacattccataggatccagcagatgctgccagacaaaagtattgcatcattggtgaagttctattattcatggaagaagaccagaactaagacctcagtgatggatcggcacgcacgcaagcagaagcgggagcgcgaggaatcagaggatgagttggaggaagccaacggtaataatcccattgatatagaagttgatcagaacaaagaaagcaagaaggaagtcccacccaccgaaacagtgccccaagtgaaaaaagagaagcatagtactgaattt

SEQ ID NO: 348 - DNA, 954 bp, synthetic construct
  source 1..954: mol_type = other DNA
gccaccatgcaatctgcttatctgcacgtgtctctggctcgcatcagcgacgaggattgctgtgccaattgcaaagggaactgcctgtccgctgatttcccttgtacctgtgctagggaaacttctggagaatacgcctacacaaaagaaggcctgctgaaagaaaagtttctggacacctgcctcaaaatgaaaaaagaaccagattcatttcctaaagtatactgcaaggattgccctcttgagcgcgaccacgacaagggtacatacgggaagtgcgatggccacctgataagaaagtttattaaagagtgttggagaaaatgtgggtgtgacatgcagtgcggaaaccgagttgttcagcgcgggattcgatgccaactgcaggtctacttcacacaggaaggaaaaggctgggggctgcggacattgcaagatctgcccaaaggcacatttatatgcgagtacattggtgagatcttgacaaataccgaactttatgaccgaaatgtgcgaagctcatcagagcgacacacgtatccggttactcttgacgctgattggggaagtgaaaaggacctgaaggacgaggaagcgctctgtctggatgctaccatttgcggtaatgttgccagattcattaatcaccgctgtgaggacgccaatatgatcgacatccctattgaaattgagacacccgataggcactattaccacattgcatttttcactctccgcgatgtgaaggccatggacgaactgacatgggactatatgatcgatttcaacgataagagccacccagtcaaagccttcagatgctgttgtggttctgaatcatgcagagacaggaaaattaaggggagccagggcaagagtattgagcggagaaagatagtgtccgctaaaaaacagcaggggtccaaggaggtatccaaaaaaaggaaagagttc

SEQ ID NO: 349 - DNA, 876 bp, synthetic construct
  source 1..876: mol_type = other DNA
gccaccatgcaactgcatgagcagatagctaatatatctgttacatttaacgacataccaaggtcagaccactccatgactcctacagaactgtgttactttgacgactttgccacaactcttgtagttgattctgtactcaatttcactacacataagatgagtaagaagcgaagatatctttaccaggatgaatataggaccgcgcgcactgtgatgaaaacattcagggagcagcgcgattggacaaatgcgatttacggactgctgaccctgcgctcagtatcacacttcctgtccaagctcccacctaataaactctttgaattcagggatcatatagttcggttcctgaatatgttcattctcgacagtggctataccattcaagagtgtaagcgatattctcaggaaggccaccagggcgctaagctggtgtctacaggcgtctggagcaggggggataaaattgagagactgtccggagtcgtctgcctgctgtcctctgaagacgaggattcaatactcgctcaggaagggagcgacttcagcgtgatgtactctacgcggaaaagatgctcaaccctttggttgggcccaggagcctacattaaccacgactgcagacccacctgtgagtttgtcagtcatggcagtactgcccacataagggtgcttagagatatggtcccaggtgatgagataacctgcttctatggctctgaattttttggtccgaacaatattgattgtgagtgctgcacttgtgaaaaaaacatgaatggagcatttagttacctgaggggaaatgagaatgctgagcctatcatttcagagaagaagactaaatatgaactccgctctcgcagtgaattc

SEQ ID NO: 350 - DNA, 3045 bp, synthetic construct
  source 1..3045: mol_type = other DNA
gccaccatgctcgaaaaccaggcgaccgtggagtttcattctggggacaaaacaatggaatgtgagaagctcgggctgagcaaacatacgaccaacgaccggactaaatacatcgacgacacggtgaaacataaagtcaagatcctgaagcgggaatctggggaggggaggaattctagcgactgccgcgacaatgaaatcaaaaagtggcaactggcacccttgcgaaaaatgggacagcctgtacttcccagacgctcaagcgaggaaaaatctgagaagatacccaaggagtcaaccaccgtgacatgtaccggagagaaggcatctaaaccgggaacacatgagaaacaggagatgaaaaaaaagaaagtggagaaaggtgtacttaacgttcaccctgcagcgtccgcgagcaagccaagcgccgatcagattagacaatccgtcaggcattcattgaaggatatattgatgaaacggctgacggactctaacctgaaggtgcctgaagagaaagcagcaaaagtggctaccaagattgaaaaagagctcttttcatttttccgcgacacagacgcgaaatataaaaataagtatcgctctttgatgttcaatctgaaggatccaaagaacaacattctgtttaagaaggttttgaagggtgaagtgacccctgaccacctcatccggatgtcaccagaagagctcgccagcaaagaactggccgcttggcggcgcagagaaaaccgacacaccatagaaatgatagagaaggaacagcgcgaagttgaacgccggccaatcaccaagatcacccacaagggggaaatcgagattgagtctgatgccccaatgaaagagcaggaggctgcgatggaaatccaggaaccggctgccaataagtctctcgagaagccagagggctccgagaaacagaaagaagaagtcgattctatgtccaaagataccacttcacagcaccggcagcatctcttcgatctcaactgtaaaatttgtattggccgcatggctccccctgttgatgatctcagccccaagaaagtcaaggtggtggttggcgtggctaggaagcactctgacaatgaggctgaatccatcgccgatgccctgtcctccacaagcaacatacttgccagcgagtttttcgaagaggagaagcaggaatctcccaagagcactttttctccggctcccagacctgaaatgccggggaccgtcgaagtggaatccacctttctggcaagactgaacttcatctggaaaggcttcatcaacatgccctctgtggctaaatttgtgacgaaggcctatccagtgagcggatctcctgagtaccttactgaggatttgcctgattcaatccaggtgggcgggcgcatttctccccagactgtgtgggactacgtggaaaaaattaaagcctccggtacaaaggagatttgcgtggtccgatttaccccggtaactgaggaggatcaaattagttacaccctgctttttgcttacttcagcagccgaaaacgctatggagtggccgcaaacaatatgaaacaagtcaaggatatgtacctgattccacttggagctactgataaaatcccccatcctttggttccatttgatggcccaggtttggagctccatcgcccgaatctcctgctgggcctcatcatacgccagaagctgaagagacagcacagcgcctgcgcatcaacctcccacatcgcagaaacaccagagagtgccccacctatcgcactgcctcctgataagaagtctaaaattgaggttagcactgaagaagcccctgaggaggagaacgacttctttaattcatttacaactgtgctgcataaacaaagaaataaaccccagcagaatttgcaggaggatcttccaacagctgtggagccactcatggaggttactaaacaagagccacctaagccactgcggtttctccctggagtccttataggatgggagaaccagccaacgactcttgaacttgccaataaaccactgccggtcgacgacatcctccagtcacttcttggaaccaccgggcaggtgtacgaccaagcgcagtctgttatggaacagaatacagtcaaggagatacctttccttaatgagcagacaaactcaaagatagagaaaacagacaacgtggaagtgactgatggcgaaaacaaggagatcaaagttaaggtggataacatttccgaatccacggataaatcagctgagattgagacttccgtggttggctcttcatctattagcgccggctccctgacgagtctgtcactgcggggaaaacctccagacgtgagtactgaagccttcctgacaaacctttccatccagagcaagcaggaggagactgtagagtccaaagaaaagaccctgaaaaggcagttgcaagaagaccaagaaaataaccttcaggataatcagacatccaacagctcaccatgcagatctaacgtcggtaagggcaatattgatgggaatgtctcttgttccgagaatcttgtagctaataccgcgagatcccctcagttcatcaatctgaagagggacccccgacaggcagctggtagatctcaacccgtaactacgtccgagagcaaggacggggattcctgcaggaatggtgagaagcacatgctgcccggcttgagtcacaataaagagcacctgactgaacagatcaacgtcgaagaaaagttgtgcagtgcagaaaaaaatagctgcgttcagcaaagtgacaatctgaaggtcgctcagaattccccgagtgtggagaacattcagacctcacaggccgaacaggcaaaaccacttcaagaggatatcctcatgcaaaacatcgaaacagtgcatccctttcgcaggggctcagcagttgccaccagtcatttcgaggtaggaaacacatgcccaagcgagtttccctccaagtccataacattcacttctaggagcaccagtccacgaacctctaccaattttagt

SEQ ID NO: 351 - DNA, 2937 bp, synthetic construct
  source 1..2937: mol_type = other DNA
gccaccatgagaactgcagggagagatcctgttcctaggcgctccccgcgatggcgccgggctgttccactctgcgagacaagcgccgggaggcgggtcacccagttgcgcggcgatgatctgaggaggcctgccaccatgaaagggaaagaaagatcccccgtcaaagcaaagcggagtcgcggcggagaggatagcacatctagaggggaacgaagtaaaaaactcggcggtagcggcggcagcaacggatcttcctctgggaagactgattcaggaggggggagtcgcaggtccctgcacctggataaaagtagctcacgcggcggttcacgggagtacgacacaggcggcggcagttcaagttctcggctgcacagttatagcagcccttctacgaaaaactcttcaggaggcggcgaatctcgctcaagttccaggggtggcggtggcgagagcaggtcctcaggggctgccagcagtgctcctggagggggggacggtgcggaatacaaaaccctcaagatctccgagcttggcagtcagctgtcagacgaggctgtggaagacggtctgtttcacgaatttaagagatttggggatgttagcgtgaaaatcagtcatcttagtggcagtggctctggcgacgaacgcgtggccttcgtcaattttcggaggccggaagacgccagggctgcaaaacatgctagggggcggttggtcctttatgaccggccccttaaaatagaagctgtgtacgtaagccggcggagaagtaggagcccgctcgacaaagacacatatccgccatctgcgtccgtggtcggagcctccgtggggggccacaggcaccctcccggaggggggggaggccagagaagcctgagcccaggcggtgccgcactcggctatcgcgattatcggctgcagcaactcgcactgggccgattgcctccacccccacctcccccactgccccgcgatctggaacgagaaagggattatccattttatgagcgggtaagaccagcatactccctggagcctcgcgttggcgccggggctggagctgctccattcagagaggtggacgaaatttcacccgaagacgatcagcgggccaaccgaacactctttctggggaaccttgatattactgtcacagagtcagacctgagacgagcgtttgaccggttcggcgtaattaccgaagtggatataaaaaggcccagtaggggacagacctcaacctacggattcctgaagttcgagaatctcgatatgagccatcgagctaaactggccatgagtggaaaaatcatcatcagaaacccaattaaaatcggttatggcaaggcaacaccaactactcgcctgtgggttggaggcctgggaccctgggtcccattggcagccctggctcgagaattcgaccgcttcgggacgattcggactatcgattaccggaagggcgactcctgggcttacatccagtacgagtccttggatgcagcacatgctgcctggacacacatgaggggattccctttgggagggccagacaggcgcctgagagtggactttgccgacacggaacacagatatcagcaacaatatctgcaaccgctgcccctgacccactacgagctcgttacagacgcatttggccatcgggctcctgatcctctgagaggggctagagatcgcacccctcctctcctgtaccgggaccgagatagagatttgtatccagactctgactgggtaccccctcctccgcccgtccgagagaggagcacccgcaccgccgccacctccgtgcccgcctatgaacctcttgattcactggacagaagacgggacgggtggagtctggacagggaccggggcgatagggacctgccttcttctagagatcagccacgaaaaagacgactccctgaggagtcaggaggtcgccatctcgaccgcagtcccgagtcagacagacctaggaagagacactgcgcgccttctcccgatagaagtccagagctcagttccagtcgcgaccggtataatagcgacaacgataggtcaagcagactgctgcttgagagaccctctcctattagagacagaagaggctccctggagaagagccagggagacaagcgggacaggaaaaatagcgcgagcgccgaacgcgaccgaaagcacagaactacagcccctacagagggcaagtctccgcttaaaaaagaggatagatcagacgggagcgcaccatccacgtcaaccgcgtcttctaagctcaagagtcccagccagaaacaggatggcggcacagctcctgtcgccagtgcaagtccaaagctgtgtctcgcttggcagggcatgcttctgctgaagaactcaaacttcccatccaatatgcacttgctccagggcgatctgcaggtagcatcttcactgctggtagagggctctactggaggtaaggtagcccaactgaagatcacacagcggctgaggctcgaccagccaaaattggacgaagtcacacgccggattaaggtggctggacccaatggctatgccatcctgctggcggtccccggatccagcgattcaaggtcttcctcaagcagcgcagcgtctgatacggccacctcaactcagcggcctctgagaaacctggtgtcctatctgaaacaaaaacaggctgccggagttatcagtttgccagtcgggggcaataaagacaaggaaaacactggcgtgctccacgccttcccaccctgtgagttctcccagcagtttctggacagtcctgctaaggccctggccaaaagcgaggaagactatctggtgatgattattgtgcgaggctttgggtttcaaatcggtgtgcgatacgaaaacaagaaaagggaaaacctcgctttgaccctcctg

SEQ ID NO: 352 - DNA, 1872 bp, synthetic construct
  source 1..1872: mol_type = other DNA
gccaccatgcaactccagcaagagaaaccatccttgtacatcggcgtcagggggactgtagttcggagcatgcaagaggtcttgtggactcggctgcgggagctgcccgaccccgtgctgtcagaggaggtagtggaggggatcgctgctggcattgaagccgcgctgtgggatctgacccaggggacgaacggccggtacaaaactaaatatcgctcactgctgtttaacctcagagatcccaggaatcttgatctctttctgaaagtggtgcatggtgatgtcaccccatacgatctcgtgcggatgagttctatgcaactggctccgcaggagcttgctaggtggcgggaccaggaagagaaacggggactcaatattatagaacagcagcagaaagaaccatgtcgcctgcccgcttccaaaatgacccacaagggtgaagtcgaaatccagagagatatggatcaaaccctgaccctggaagatcttgtggggccgcaaatgttcatggactgctctccccaggctttgcccatcgcgagtgaagacacaacgggccagcatgaccaccacttcttggaccccaactgccacatttgcaaagactgggaaccctccaatgagttgctgggttcctttgaggcagcaaagagttgcggtgacaacatatttcaaaaggcactcagccaaaccccaatgcctgctcccgaaatgcccaagaccagggaactgtcacctactgagccacaggacagagttcctccgagcgggcttcacgttccggctgcgcctactaaagcacttccatgtcttccaccttgggagggggtattggacatgttttctatcaagagattcagggcgcgagcgcagcttgtaagcgggcacagttgccggttggttcaggcactcccaaccgtgatcagaagcgccgggtgcatcccgtcaaacatcgtctgggacctccttgccagtatctgccctgccaaggctaaggacgtttgtgtggtgaggctgtgcccccacggcgcacgcgatactcagaactgccgactgctttatagctacctgaatgaccggcagaggcacggactcgccagtgttgaacacatgggcatggtcctgctgccccttcccgccttccagcccttgccaacgcgcctgcgccctctcggaggccctggtctgtgggctttgcccgtgtcccctcttctctctcccgggcttgaggttacccacagtagcctgctcttggcagtactgcttcccaaggagggcctccctgatactgcaggctcttctccctggctgggaaaagttcagaagatggtcagcttcaattccaaggtggagaaacggtactaccaacctgatgatcggagaccaaacgtgcccctgaaaggaactcccccaccgggaggggcctggcaacagagtcagggtcggggaagcatcgctcctagaggaatcagcgcttggcagcggcctccccggggtaggggccggctgtggcctgagcccgagaactggcagcatcctggaagaggtcagtggccaccagaacccggccttcggcagtctcaacacccttacagcgtagctcctgccggtcacggtttcggtaggggccaacacttccaccgggattcctgccctcatcaagccctcctgagacacctcgagtccctcgccaccatgagccatcagctgcaggctctgctgtgcccgcaaacaaaaagcagtattccgcgcccactccaaaggttgagtagtgcactcgccgctccagagcctcctgggcctgccagggactcaagcctggggccgacagacgaagccgggtcagaatgcccctttccccggaaggct

SEQ ID NO: 353 - DNA, 2709 bp, synthetic construct
  source 1..2709: mol_type = other DNA
gccaccatggcattgtcaatgaaacccttcagagcggacgattctggcttccagtctaataatctctgggtgggaagcctgacgccagaaaccacggagagtgatctcactgaactgtttggacgatatggcgatatcgaccggatcaccgtctacagcagcagaggattcgcatttatatattatcgccacgtcgaagaggctgtggctgcaaaagaagccctgcagggggccaatttgaacggtagccagattaaaattgagtatgcacgcccggcaaagccatgtaagtccctctgggtcggtggtattggaccaaatgttagcaaggatgatttggaagaagagttcagcaagtttgggaaaatcgaagattttagatttctgcgagagaggaaaaccgccttcatcgattattatgaaatggatgatgctctccaggccaaaagtatgaacggaaaacctatgggtggctcctttttgcgagtagactttctccggagccaggcgcctaagaaagagcaatgggcggggtcctacgacaatcgcaacggaaatatgaatcataagccacagtatccacactcttatgaagattttaagggagatgttcagccctctaaggtactttggattgggtttccaccgacagccactcagtgcaatgatgaacaaatcctgcataatgccatgatactgttcggggaaatcgaacgggtcaagagctaccccagcagaaacttcgccctcgtggaattcaggagcgccgaagaagctagacagtgcaaagaaggccttcagggccgcctcttcaacaaccctcggattaaaattatgtacagtaatgacgaactcccccccgagcaagatgacacctctttttactccggaatgaagcgctctagaacggatatgttcaataacgacccatcttttgtgtcttctccccattctaccggaattccaggatcaatgagacctcttcggggaaccaacgaacgcagctacaacggcgccgagtacaatgatgtggttggcaaagaaccaaattggaggaggccttccgccaatggcacgggaattttgcccagtccgactgggccggggattctcccctcccccgcacaggggactcgccggcccatgcgctccaatccagacagttgggagggttacgacccagcccagctcgtgagggaatctaagcgcacccgccgggacgggtccgtggatggattcacccctatgggggtggatgagaggtccttcggacgcgggtccgtagctgcgcgccccatccgaggccctcccgattccgatcatatctggcgcggaatgatcgccaaaggcggcactccggtgtgctgcgcaagatgcgttccgatgggaaagggaattgaaacaaagctcccagaggtggtcaattgtagtgccagaacggaccttaacatgctcgccaaacactacgcagttgccattggctgcgagattgtcttcttcgtcccggatcgggaagaagattttgcttcctacaccgagttcttgaggtatctgagtagcaaggaccgcgcaggtgtcgctaagcttgacgacgggacgacgctgttccttgtgcctccatctgactttctgacggacgtgcttcaggtcactaggcaggaaagactgtacggtgtggtgctgaagctgccgccacctgctgtccctgtaaccgcaagctacaggcaagaaagccagagtaaccccttgcactacatggaccaggctagagattctcccgcaaacgcttcccatagtttgtatccacctcgggaaaattacattcggggcgctccggaacacctcacagctgcttcaaagccctcagtatccgaaccactcagaattccaaacaatgccgcccctcaggccggtgtctcccttaccccagagctcctcgctacattggcttctatcctgcccgccacttcccagccggcagcccctgagagccaccaacctatgagtgggccctctacagtggtgtccacagctcaccagagcaatgggctttacaatggcgaagccccaagccaagcatggaaacgcgggccccaaaccgtccacgatgcaagcaaccagagcttccagcagtacggcaaccaatatacccccgcggggcagcttcctcccccacccagcagatatcctcctgcctcaaataaccccaactatacatccgggatggtgcacgggaacatgcagtatcagagccagagcgtcaatatgccacagctgtctccactgcccaacatgccacacaataactatagtatgtatacccagggaagctccaaccatccagtgagtcagcccatggttcagcagtatcagcccgaggccagtatgccaaaccagaactatggaccaattcctagttatcaacaggccaactttcacggtgtgacaacaaaccaagcccaaaatctgaatccttctcagttccaggccgctatgcagccgcctgccgataaagccaaccttgaaccacagaaccaggcactgcgactccagcctatgatctctggcgatggccaggggacgacagacggcgaggttgacaaaaaccagcggtaccaaagtacacttcagtttgccgcgaaccttctgctccagattcaacagaaacagcagcagcagtctagcggcacgccagcggggcaaggtccc

SEQ ID NO: 354 - DNA, 2466 bp, synthetic construct
  source 1..2466: mol_type = other DNA
gccaccatgtctggaagtacccaaccagtcgcgcaaacctggagagcgacagagccgaggtaccctcctcactcactgtcttacccagttcagattgctcggacccacactgacgtcggactgctggagtatcagcaccactcccgggactacgccagccatctgtctcccggaagtatcattcagccccagagaagaagaccgtctctgctgtccgagtttcaacctggcaacgaacgctctcaggagctccaccttagacccgaaagccactcatatctcccggagttgggaaaaagcgaaatggaatttatcgaaagtaagcggcctcgcctggagcttctgccggatccgttgctgagaccctctccattgcttgccacaggccagcctgccgggtccgaagatcttaccaaggaccgatctctgaccggcaagcttgagccagtttccccgccgtctcctccacacaccgacccggagttggaactggtgcccccccgcctgtctaaggaggagctgatccaaaacatggatagggtggacagggagattactatggtggagcagcaaatctcaaaacttaaaaaaaagcagcaacagctcgaagaggaggccgctaagccccccgaaccagaaaaaccggtgtcccccccgcccattgagagtaaacaccggagcctggttcagatcatatatgatgagaaccggaagaaagcggaggctgcccaccgcatccttgagggtctgggcccccaggtggaactccccctgtacaaccagccctccgacacaagacagtatcacgagaatattaagatcaaccaagccatgcgcaagaagttgattctgtatttcaaacgccgcaatcacgcacgcaaacaatgggagcagaaattttgtcagcggtatgatcagttgatggaggcatgggaaaaaaaggtggaaaggatagaaaacaatccacggcgaagggccaaggaaagcaaagtgcgggaatactatgaaaagcaattccccgaaatccggaagcagagggagctgcaagaaagaatgcaatcccgcgtgggacaacggggctctgggttgtccatgtctgcagctagatccgaacacgaggtgagcgaaattatcgacggcctctccgaacaggagaacctggaaaagcagatgagacagctggccgttatcccgcccatgctctatgacgcagatcagcagcgcattaaattcatcaacatgaacggactgatggccgatccaatgaaagtctataaggacagacaagtgatgaacatgtggagcgagcaggaaaaggagaccttccgggagaagtttatgcagcacccaaaaaattttggtcttatcgcctctttcctggaacggaagacggttgctgagtgcgtgctctattactatctgactaagaaaaatgaaaattacaagtcactggtaagacggtcctacaggcgcagaggaaagtctcaacagcagcagcaacagcagcagcagcagcagcaacaacagcagcaacaacctatgccgcgaagctctcaggaggagaaagacgaaaaggaaaaggagaaagaggctgagaaagaggaagaaaagcctgaggtggaaaatgacaaggaggatctgctgaaagaaaaaacagacgatacatccggtgaggataacgatgagaaagaagctgtggcttctaaggggcggaagacggcgaattctcagggccggagaaagggcaggatcaccagaagcatggccaacgaagccaattccgaggaggccattacgccccagcaatcagctgaactggcttccatggagttgaatgagagttctagatggactgaggaggagatggaaactgccaagaaaggcctgcttgagcacggccggaactggtctgctattgctcgcatggtggggtcaaagaccgtcagtcagtgtaagaatttctactttaactacaagaagagacagaatctggatgagattctgcagcagcacaaacttaagatggagaaggaaagaaacgcccgccggaagaaaaaaaaggcacctgctgctgccagcgaagaggctgcattcccgccagtagtggaagacgaagagatggaagcgtccggggtatccggtaacgaagaggaaatggtcgaagaagccgaggcgttgcacgcatctgggaacgaggtcccgcgaggcgaatgcagcggacccgctacggtgaacaattcatcagacactgagagcattcccagcccacacaccgaagcggctaaagacactggacagaacggcccaaaacctccggcaactttgggcgcagatggaccccccccgggtcccccaactcctccccctgaggacatcccagcccccaccgagccgactcccgcgagtgaggccaccggtgcgccaacacctccacccgctccaccatccccctcagctcctcccccc

SEQ ID NO: 355 - DNA, 2655 bp, synthetic construct
  source 1..2655: mol_type = other DNA
gccaccatggtggtccccaaggaagagaaggaggaggagaccgccgctgccccccccgtggaggagggcgaggagcagaagcctccagcggccgaagaattggctgtagacacaggcaaagccgaggaaccggtgaagtctgaatgtactgaagaggccgaggagggcccagctaaaggaaaggatgcagaagccgctgaggcaactgccgagggcgctctgaaggcagaaaagaaagagggcggatccggccgagccactacagctaagtcatcaggtgcgcctcaggactctgattcttctgccacatgcagcgcagatgaggtagatgaggcagagggtggagacaagaaccggcttctgtctccccgcccctctctgttgacaccgacaggggatccacgcgccaatgccagcccgcagaagccactggatttgaagcagctgaagcagagggccgctgccataccccccatccaggtgactaaagtccatgagcctcccagggaggacgccgctcccacaaagcccgctccccccgcgccgccccctccacagaatctccaacctgaatccgatgccccccaacagccaggcagtagccccagaggaaaatcacgctccccagccccccctgcagataaggaagcatttgccgccgaggcccagaagttgccgggagaccccccctgttggacctccggcctgccgtttcccgtgccccctagggaggtcatcaaagcctctcctcacgcgccggatccgtccgctttcagttatgcacctcccgggcaccccctgcctctcggactccatgacacagcacgacccgtactgccacggccgcctacaatcagcaatccaccccccctgatttcaagcgccaaacacccgtctgtcctggagcgccagataggagcaatcagccaagggatgtcagtccagcttcacgtgccttattctgagcacgctaaagcccccgtgggtcctgtcacgatgggtctgcccttgccaatggaccccaaaaagctcgcccccttctctggtgtcaagcaggagcagttgtctccccgggggcaggccggcccacccgaatctctgggagtccccaccgctcaggaggcctctgttctgagaggtacggctctgggaagcgtgcccggaggatctatcaccaagggtataccctctacacgcgtcccatccgactccgctatcacatacaggggctcaatcacccacggcactcctgccgatgtgctctataagggcaccatcactcggattatcggcgaagactcaccttctcggttggatagaggccgggaggatagtctccctaagggtcatgtcatctacgaaggcaaaaaaggccatgtccttagttatgaagggggaatgtccgtcacccagtgttctaaggaggacggaagatcaagttctggcccacctcacgaaactgccgcgcccaagaggacttatgacatgatggagggcagggtgggcagagccatctcttccgcaagtatcgaaggtctcatgggtagggctattcctccagaaagacactcccctcatcacctgaaggagcaacaccatattagaggctccataacacagggcatcccccgatcctacgtcgaagctcaagaagactacctgcggagagaggctaagctgttgaaaagggaggggaccccaccaccaccacccccgtctcgcgatctcaccgaggcttataagacacaggctctgggcccactgaaactcaagcctgcgcatgaggggctggtggcaaccgtgaaagaagctggccgcagtatacacgagatccctcgggaggaacttcgacacactcctgaactgccgctggccccccgacctttgaaagagggctcaataactcaggggacccccctgaaatatgatactggtgccagtaccactgggtctaaaaagcacgatgttaggtctctcatcggatcacctgggcggacctttccaccggtgcaccctctggacgtcatggcagatgctagagccctcgagcgagcttgctatgaggagtcactgaagtctcgacccggaacagcatcaagtagcggggggtccattgctaggggcgcgcccgtcatagtccccgaactgggaaaaccgcgccagagccccctgacctatgaagatcacggcgccccattcgccggacatcttccacgcggctctcctgtcaccacccgggagcctacacctcggctgcaagaaggtagcctctcctccagcaaggcttcacaagaccgcaagttgacgagcactccccgggagatcgcaaaatccccgcacagcactgtacccgaacaccatccacatccaattagtccctatgagcacctgctccggggcgtgtccggtgtcgacctctatcggtctcacattccccttgccttcgaccccacaagcattcctcgaggcatccctctcgatgctgctgctgcctattacctgccaaggcatctggctccaaatccaacttatcctcacttgtatcctccctacctcataagggggtatcccgatacagcagccctggagaatcgccaaactatcattaacgactatattacctcccaacagatgcaccataatgctgccacagct

SEQ ID NO: 356 - DNA, 2442 bp, synthetic construct
  source 1..2442: mol_type = other DNA
gccaccatggcccaacgcgcagatatgctgagaggactgtcccctcgagaaagctcactggccttgaattacgccgccgggccccgggggattattgatctgagtcaagtaccacatcttccagtgctggttccgcccacacctgggactccagctacagctatggaccggctggcataccttcctaccgcaccccagcctttcagtagcagacactcttcctccccactttcccccggcgggcccacacaccttactaagccgacaaccacatctagctctgagcgcgagcgagatcgcgatcgagaaagagacagagatcgggagagagaaaagtccatactcacatctactacaactgtggagcacgctcccatctggagacccgggacagaacagagctctggatcttccggggggggcggggggagttcatccagacccgccagccactctcatgcccaccagcatagccctatctcaccgcggacccaggacgccctgcagcagaggccaagtgtgctgcataacacaggtatgaagggaattattacagccgtggaaccctcaacgccaacagttcttaggtcaacaagcacctccagcccagtgagaccggccgccactttcccgcctgccacgcactgccccttgggcggcacgctggatggagtctaccctacgctgatggaaccagtgcttcttccaaaggaggctcctcgggtggcccgaccagaacggccaagggctgacaccgggcacgcttttctggccaagccccccgctagatccggcctcgagcccgcctcttctccatcaaaggggtccgaaccccgaccattggtgccaccagtgagtggccatgcgactatagctagaacccctgctaagaatctggcccctcaccacgcatcccctgatcccccggccccccctgccagtgctagcgaccctcacagagagaagactcagagtaaacccttcagtatacaggagctggagctgcgctccctcggatatcatgggtcaagctattcaccagaaggggtcgaacctgtgtctcccgtgtcatcacctagcctgacacatgacaaagggctccctaaacatctggaggagctggacaagagccacctggagggtgagctgagacctaagcagccaggacctgtcaaactggggggcgaagctgcccacctgcctcacctgcggccccttccagagtcacagccttccagttcacctctcctgcagaccgcccccggcgttaagggccatcagcgggtggtgactctcgcccagcacattagtgaagtaatcacgcaggattatactcggcatcacccccagcaactgagcgctccccttccggcaccgctgtactctttcccaggcgcctcatgcccagtgctggatctgcgcaggcccccatccgacctgtacctgcccccccccgatcacggggctcctgcccggggcagccctcacagtgagggaggcaaaagatctcctgagcctaacaaaacatcagtgttgggtggaggagaagacgggattgagccagtcagcccaccagagggaatgacagaacccggacacagcaggagcgcagtatatcccttgctgtaccgcgatggcgaacagacagagccttccaggatggggtcaaaatccccaggcaatacatctcagccaccagccttcttctccaaacttacagagtccaatagcgcaatggtgaaatctaagaagcaagaaataaacaagaaactcaatacccacaaccggaatgaacctgaatataacatctcccagccaggcacggagatatttaacatgcctgctattacaggtacaggccttatgacttaccggtctcaagccgtccaggaacatgccagtaccaacatggggctcgaggctattataagaaaggcactgatgggaaagtacgatcagtgggaagaatctcctcccctcagtgccaatgcttttaacccacttaatgccagcgccagcctccctgcagccatgccaattaccgcagccgatggtcggtctgaccacactctcacctcccccggcggagggggaaaagcgaaagtaagcggtaggccatcctctagaaaagccaaatccccagcccctgggctggctagcggagatcgccctcccagcgtgtcatctgtgcattcagagggcgactgcaacaggcgcaccccccttaccaaccgggtatgggaagataggccatccagtgcgggctccacccccttcccttataatcccctcatcatgaggctgcaggccggcgttatggccagccctccaccccccggcctgcccgcaggatccggaccgctggccggtccacatcatgcatgggatgaggagcccaagccactgctgtgtagccaatatgagactctcagtgactccgag

SEQ ID NO: 357 - DNA, 1290 bp, synthetic construct
  source 1..1290: mol_type = other DNA
gccaccatggcaaaaaccgttgcttatttttacgaccctgacgtgggtaatttccattatggtgccggccatccgatgaaaccccacaggctggctttgacacatagtttggttctgcactatggtttgtacaaaaaaatgatcgtgttcaaaccctatcaagcatcccaacatgacatgtgtcggtttcactctgaagactacattgattttctgcagcgagtgagtcctacaaacatgcagggatttaccaagagtctcaatgccttcaatgtgggtgatgactgtcctgtgtttcctggattgttcgaattttgctcccggtacaccggcgcctccctgcagggggctacacagctgaataataagatttgtgacatcgctataaattgggctggaggcctgcaccacgccaagaaatttgaagcctctgggttttgttatgtgaacgacattgtcatcggaattctggaactgctgaagtaccatcctagagtgctgtacattgacatcgacatacaccatggggacggcgtgcaggaggccttttatctcactgaccgggtgatgaccgtctcatttcacaaatacgggaactatttcttcccaggcactggagatatgtatgaagtcggggccgaaagtggccgctactactgtcttaatgtgccgctgagagacgggattgacgatcaaagctataaacacctgttccaacctgtaatcaatcaggttgtcgacttctaccagcccacttgtatcgtactccagtgtggcgcggactcacttgggtgcgatcggctgggatgcttcaatctcagcataaggggtcacggggagtgtgtcgagtatgtgaaaagcttcaacatcccactcctggtgttgggaggagggggatataccgtaaggaacgtggctaggtgttggacgtatgaaaccagcctcttggtggaggaggccatcagcgaggagctcccctatagtgaatattttgagtacttcgctcctgactttacgctccatccagatgtcagtaccaggatcgagaatcagaactcacgccagtacctggaccagatcaggcagactatcttcgagaatctgaaaatgctgaatcatgcgccttccgtccaaatacacgacgtacccgccgacctgttgacatacgatcggaccgacgaagctgacgcagaggagaggggccctgaagagaactatagtcgccccgaggctcctaatgagttttacgacggtgatcatgataacgacaaggagtctgacgtcgaaatt

SEQ ID NO: 358 - DNA, 429 bp, synthetic construct
  source 1..429: mol_type = other DNA
gccaccatggcgagcccctctaaaggaaatgacttgtttagtccagatgaagagggcccagcagttgtggccggtcccggcccgggccccgggggagctgagggcgccgccgaggaacggcgggtgaaggtttcctcactgcctttttccgtggaggccctgatgtctgacaaaaagccacccaaggaggcgagtcctctgcccgcagagagcgcatctgctggggctactctgcggcctcttctgctctctggacacggggccagggaagcccatagccccggacccctggtcaaaccatttgaaacagcctctgttaagagcgagaattccgaggatggcgccgcctggatgcaagagcccgggcggtactcacctcccccaagacatatgtcaccgaccacttgcacccttcgcaaacacaagact

SEQ ID NO: 359 - DNA, 207 bp, synthetic construct
  source 1..207: mol_type = other DNA
gccaccatggaggcggaactcgagaagctgaaaatggccgctaagcccatgttgccaagttcattcagtctcccattccctatcagctctcccctgcaggcagctagtatttacggagccagctatccattccacagacccgtcctcccaatcccacccgtcgggctctacgcaactcctgtgggatacggtatgtaccacctctca

SEQ ID NO: 360 - DNA, 3168 bp, synthetic construct
  source 1..3168: mol_type = other DNA
gccaccatgtccaccaaggaagatagacgcagcgaagaaaaggccgccgccatggcagcctccaaaaagacggcccctccaggcagcgctgtcggcaaacagccggccccgcggaatctcgtcccgaagaagtcttctttcgccaatgtagctgccgccacacccgccattaaaaagccccccagtggctttaaagggactatccccaagagaccttggctgtctgcgacaccttcatccggcgcttctgccgcccggcaggccgggccagcccccgctgccgctacagcagcgtctaaaaagttccctgggtccgcagctctcgtgggagccgtcaggaaaccggtggtgcccagtgttcccatggccagccccgcacctggtaggctgggcgcaatgtccgccgcacctagtcagcccaatagccaaattcgacagaatatccggcgcagccttaaagaaatcttgtggaagagggtaaatgactcagacgacctgattatgacagaaaatgaggtagggaagatcgcactgcatatcgagaaagagatgttcaatttgttccaggtgactgacaacaggtacaaaagcaagtacagaagtatcatgtttaacctcaaagatcctaagaatcaaggactgttccacagagtcttgcgggaggaaattagcttggcaaaactggtgcggctgaaacccgaggagctggtaagtaaagagctgtcaacatggaaggaacggccagccagatctgtgatggaatcaagaacaaagctgcataatgaatcaaagaagactgcgccacggcaagaggccattcctgatctggaagacagccccccagtgagtgactctgaagagcaacaagaatccgccagggccgtgccggaaaaaagtactgcaccactcctggatgtgttctcttctatgcttaaagacactacaagccagcacagagcccacttgtttgacctgaactgcaaaatttgcaccggccaggtcccgtctgccgaggacgagcccgcacccaagaagcaaaaattgagcgcttccgttaaaaaagaggatcttaaatcaaagcacgatagcagcgcaccagacccggcacccgactctgcagatgaggttatgcctgaggcagtgcccgaagtggcctcagagccgggactggagagtgccagccaccctaacgtcgatcggacctattttcctggtcctccaggcgacggtcacccagagccatctcccctcgaagatctgtcaccctgccctgcgtcctgtggcagtggggtggtcacgactgtgaccgtgagtggaagagacccacggaccgccccctcctctagttgtactgccgtggcttctgcggcaagccgccctgatagtacacacatggtagaggccagacaggacgtgcctaagccagtgctgacctctgtgatggtccctaagtcaatcctcgctaagccgtcaagttcccccgatccgcggtatttgtcagtacccccaagccccaacataagtacatcagagagcagatctcctcccgagggagatactaccctgttcctgtctcgcctgagcacaatttggaagggtttcatcaatatgcagtccgtcgccaaatttgtgacaaaagcatatcccgtttccggctgcttcgattatctgagcgaggatcttccagacacaatccacatcggagggagaatcgcccctaaaaccgtgtgggattatgtgggtaaactgaaaagctccgtgtctaaagagctctgcctgatcaggttccatcctgcaactgaagaagaagaggttgcttacatttctctctactcttatttttcttccagaggtagattcggtgtggttgccaacaataatagacatgtaaaagacctgtatctcattcctctgtccgcccaggaccccgtcccaagcaagctcttgccattcgaggggccaggactcgagagtcccagacccaacattattctggggctcgtcatctgccaaaagattaagcgccccgccaatagtggagaattggacaaaatggatgaaaagcgcactagactgcagcccgaggaagctgacgtgccagcctatccaaaggtggctaccgtcccacagagtgagaagaagcctagcaagtatcctctgtgctccgcagacgcagctgtgagcaccacacctcctggtagtcctcctccccccccaccactgcctgagccccccgttcttaaagttctgtcttctctgaagccagcagcaccaagccctgccactgcggccacaaccgccgcggccgcctctactgcagccagctccaccgcgagcagtgcttctaaaactgccagccccttggagcacatattgcagaccctgtttggcaaaaagaagtcatttgatcccagcgcaagagagcctcccggatctaccgcaggactgccacaggaaccaaagacaactgccgaggacggcgtccctgcgccccccctgctcgaccctattgtacaacaatttgggcagttcagcaaggataaggcacttgaggaggaggaagatgacagaccatatgatcctgaagaagagtatgaccctgagcgcgcttttgatacacagctggtggagaggggaaggcgacacgaggtagagcgggcaccagaagccgctgccgctgaaagggaggaggtcgcatatgatcctgaggacgaaactattttggaggaggcgaaagttacagtcgatgacctgcccaatagaatgtgcgccgatgtcagacggaattccgttgaacgaccggcggaaccagtggccggagcagctacacctagcttggtggagcagcagaagatgcttgaagaactgaacaaacagattgaagagcaaaagcggcagctggaggaacaagaagaggcgctgcgacagcagagagcggctgttggggtgtccatggcccacttttcagtatctgatgccctgatgagcccgcccccaaagtcatcccttccaaaggccgaactgttccagcaggagcaacagagtgcagataagccagcaagtctccccccagcctcccaggccagtaatcacagagaccctcgccaagcccggagattggccaccgaaactggggaaggcgaaggcgagcccctcagtaggttgtcc

SEQ ID NO: 361 - DNA, 1767 bp, synthetic construct
  source 1..1767: mol_type = other DNA
gccaccatggccaggatgctgcaggacgtcttcgaaactcacttcagcaagattcccatcgagcccgtggagagtatgccactgtgctacattaagactgatatcaccgaaaccacaggccgggagaatacaaacgaggcatcctccgagggcaatagttctgatgattccgaagacgaaagagtgaaacggctggcaaagctccaagagcagctgaaggctgtgcaccagcagctccaggttctttctcaagtgccattcaggaagctgaataaaaagaaagaaaaatcaaagaaggaaaagaagaaagaaaaagtcaataacagcaatgaaaatccacggaagatgtgcgaacagatgcgcctgaaggagaagtccaagaggaatcagcctaagaaaaggaagcagcagtttatcggccttaaatccgaagacgaagataatgccaagcccatgaattacgacgagaaacggcagttgtccctgaatattaacaagctgcccggggacaagcttggccgagtggtccatataattcagtctagagaaccctccctctccaattcaaacccggacgagatcgagattgatttcgaaacgttgaaggcttccacgctcagggaactggagaagtatgtgtccgcatgcctgagaaagagaccgcttaagcctcctgctaagaaaatcatgatgtccaaggaagagctccactctcaaaaaaagcaagagctcgagaagcggctgctcgatgtaaataatcagttgaatagtaggaagaggcaaaccaagtctgacaagactcaacccagtaaagccgtggaaaacgtgagccgactcagcgagtcatcatcctccagcagtagctcctctgaaagtgaaagcagttcaagcgatcttagttctagtgatagcagcgactctgagtcagaaatgtttcccaagtttactgaggtgaaacccaacgattctcccagcaaggaaaacgttaaaaaaatgaagaacgagtgtattccacctgaagggagaactggcgtaacgcagattgggtactgcgttcaggataccacctcagcaaacacgaccctggtgcatcagactacgccctcccatgtaatgcctcccaatcaccatcagcttgcttttaattaccaggaattggagcatttgcagactgtcaagaatatttcaccactgcagattctcccaccatccggggattctgagcaactctccaacggaattaccgtcatgcacccttccggagatagcgatacgacgatgcttgaaagcgaatgtcaggcccccgttcagaaggacatcaagattaagaatgccgactcatggaagtctctggggaagcccgttaagccctctggcgtcatgaaatcctccgacgaactttttaatcagtttagaaaagccgctatcgaaaaagaagtgaaagcccgcacccaggagctgattagaaagcatctcgagcagaacaccaaggagcttaaagcgtctcaggaaaaccagcgcgacctgggcaatggcctgactgtggaatccttttctaataaaatccagaataaatgctctggcgaagagcaaaaagaacatcaacaatcaagcgaagcacaagacaaatccaagctgtggcttctcaaggatcgggatcttgctcggcagaaagaacaggagcgccgcaggcgcgaggcgatggtcggaaccatagatatgacactgcagtctgacataatgaccatgtttgaaaacaattttgac

SEQ ID NO: 362 - DNA, 840 bp, synthetic construct
  source 1..840: mol_type = other DNA
gccaccatgaagaaaaaccgcgcctttctgaagtgggcggggggaaaatacccccttctggacgacattaaacgccacctccctaagggagagtgcctggtcgagccctttgttggtgccgggtcagtgttcctgaacaccgattttagcagatatatcctcgccgatattaattcagacttgatttcactgtacaacatagtgaagatgaggacagacgagtacgtccaggcagcccgcgagcttttcgtgccagagacgaactgtgccgaagtgtactaccagttcagggaggagttcaataagtctcaagatcccttcagaagggcagtgctgttcctgtacctgaacagatatggatacaatggcctgtgtcgctacaacctgaggggggagtttgcagtcccctttggccgctataaaaaaccatactttcccgaggcagagctgtatcactttgctgagaaggcccaaaacgcttttttttattgcgagtcttatgccgactcaatggccagagccgacgatgcgtcagtcgtgtattgtgacccgccatacgcaccgctgtctgcaactgcgaatttcaccgcatatcatacgaattcattcaccctggagcagcaagcccacctggccgaaatcgcagagggcctcgtggagagacatatcccagtactcatttccaaccatgacacaatgctgacacgcgagtggtatcagagagcaaagctccacgtggtcaaggtccggcggagcatcagctccaacggcggtacacgcaagaaggtcgacgagcttctcgccttgtataagccaggcgtcgtaagtcctgcaaagaag

SEQ ID NO: 363 - DNA, 252 bp, synthetic construct
  source 1..252: mol_type = other DNA
gaccaagaaggggggggcgacggccagaaagccccatcattccagtggagaaattacaagctgatcgtggatcccgctctcgatcccgctttgcggcggccatcccagaaggtttatcggtatgacggggtgcatttctctgttaacgactccaagtacattccggttgaggatctgcaggatcctcggtgccacgttcggtccaaaaatcgggatttcagcctgcccgtgccaaaattcaagcttgactaa

SEQ ID NO: 364 - DNA, 1230 bp, synthetic construct
  source 1..1230: mol_type = other DNA
gagcataactacgccctggcagtcaagcccaccccgccagctcccgcgttgagacctccggagccggtcccagcacctgccgcgttgttctcctcccctgcagacgaggtgctggaggcccctgaagtggtggtggcagaggcagaggaaccaaagccccagcagctgcagcaacagcgggaagaaggggaagaggaaggagaagaggaaggtgaggaagaggaggaagaatctagcgattcctcctcaagcagcgatggagagggtgccttgcggagaaggtctttgagatcccacgccaggaggagaagacctccgccaccaccgccccctccccctccccgcgcctacgaaccacgctcagaattcgaacagatgactatcctgtatgatatttggaattccggattggacagtgaagacatgtcctatctcagactgacttacgaacgattgctccaacagacatccggcgccgactggcttaatgacacccactgggttcaccacacaatcaccaacctgaccacccctaagcgaaaaaggaggcctcaggatggacctcgggagcaccaaacggggagtgcgaggtccgaagggtattatcctatctccaaaaaggaaaaggataagtatctggatgtttgccccgtttccgcccggcaactggaaggcgtggacactcaagggaccaatagggtgctcagcgaaagacgatctgaacagaggaggcttctctccgctattggtacgtctgcaatcatggatagcgatttgctgaaactcaatcaactgaagttccgaaagaaaaagctgagattcggaaggagccggatccacgaatggggtctgttcgccatggaacccatcgctgcagacgagatggtaattgagtacgtgggccagaatattcggcagatggtcgctgacatgagggagaaacggtacgttcaagaaggtattggatcttcctacctctttagagttgaccacgacacaatcatagatgcgaccaaatgtggtaacttggctaggttcatcaatcattgctgcacaccaaattgttacgcaaaggtcatcacaatcgaaagtcaaaaaaagattgtgatatactctaagcagcccatcggcgtggatgaggagatcacttacgactataagttccccctcgaggacaataagattccatgcctgtgcggcactgaaagctgcagggggtctctcaactaa

SEQ ID NO: 365 - DNA, 1284 bp, synthetic construct
  source 1..1284: mol_type = other DNA
gccaagacggtcgcttatttttatgaccccgatgtcggtaatttccattacggcgcaggccaccctatgaagccacacaggttggctttgacccacagcttggtgctccactacgggctctacaaaaagatgattgtttttaaaccataccaggcaagtcagcatgatatgtgtcgcttccattctgaagattacattgattttctccagcgggtctcccccacaaacatgcagggcttcaccaagagcttgaatgcattcaatgtcggcgatgactgtccagtgttccctggtctgttcgaattctgctcccgctacactggtgctagcctccagggggctacacagctgaacaataagatctgtgatatcgccatcaactgggcaggtggcctgcatcatgctaagaaattcgaagcctccggattttgctatgtgaatgatattgtgattgggatcctcgagctgttgaagtatcaccctcgcgtcctttatatagacatcgacattcaccatggagatggcgtacaggaagcattctacctgacagatcgcgttatgaccgtgagcttccataagtacgggaattattttttccccggtaccggagatatgtacgaggtaggcgccgagtcaggaaggtactactgcctcaatgtgccactgcgcgatggaatcgatgatcaaagttacaaacatctctttcaaccggtgattaaccaggtcgttgatttttatcaacccacttgtatagtcctgcagtgtggagcggacagcctgggttgcgaccggctgggctgctttaacctgtcaatccggggccacggggagtgtgtagaatatgtcaagagttttaatatccccttgctcgtgctgggtggggggggttatacagtgcgcaatgttgcccggtgctggacgtatgaaacaagcctgttggtggaagaggccatttccgaggagttgccttacagcgagtattttgagtacttcgctcctgactttactcttcaccccgacgtcagtacccgaatcgagaaccaaaactccagacagtacctcgatcaaatacgacagacaatcttcgagaatttgaagatgcttaatcatgcaccatcagtgcagatccatgacgtgcctgccgatctgctcacgtatgaccgaactgatgaggctgatgcggaagagcgggggccagaagagaactatagtcggcctgaggcacccaatgaattctacgacggcgaccacgacaatgacaaggagagcgatgtcgagatttaa

SEQ ID NO: 366 - DNA, 3285 bp, synthetic construct
  source 1..3285: mol_type = other DNA
aaatcatgcggcgtgtccctggcaactgcagccgcggcagctgcggcctttggggacgaagaaaaaaagatggcagccgggaaggcatccggcgagtccgaagaggcctccccttctctgaccgcagaggaaagagaggccctgggcggcctcgatagcagactgtttggcttcgtgaggtttcatgaggatggcgcacgcacaaaggctctgctcgggaaggcggtcaggtgctacgagtctctgattttgaaggccgagggaaaggtggagtctgacttcttctgccagttggggcattttaatctgcttttggaggattacccaaaggctctctctgcataccagcgatactattcccttcaaagcgattattggaaaaacgcagcttttctctacggcctgggcctggtctattttcattacaacgcctttcagtgggctatcaaagctttccaagaagtgctgtacgtggacccgtctttctgtcgagctaaggaaattcatctgcgactgggactgatgttcaaagtgaacacggattacgagtcatcccttaagcactttcaactggcccttgtggattgcaacccctgcactttgtctaacgctgagattcagttccatattgcccacttgtacgagacacagcgcaaatatcacagcgccaaagaggcatatgaacagctgctgcagactgagaatctctcagcccaggtgaaggctactgtattgcagcagctgggttggatgcaccatacagttgacttgctgggtgacaaagctacgaaggaaagctatgcgatccagtatcttcaaaagtccctggaagccgatcccaattctgggcagagctggtatttcctcgggcgctgttactccagcattggcaaggttcaggacgctttcatatcctacaggcagtcaatcgacaaaagtgaagcctccgccgacacctggtgttctatcggcgtactgtaccagcaacagaaccagcctatggacgcactgcaagcctatatttgtgctgtgcagctggaccacggccacgccgctgcatggatggacctggggaccctgtatgaaagctgcaaccagccacaggatgccatcaaatgttaccttaatgccacgaggagcaagtcttgttctaatacgtcagccctggctgcccgcattaagtacctccaggctcagttgtgcaacctgccacagggttccttgcaaaataaaacaaaactcctgccatcaattgaagaagcatggtccttgcccatccccgccgagctgacttctcggcagggtgctatgaatactgcccagcagaatacgtctgacaactggagcggtggacacgccgtgagccatcctcccgtgcagcagcaggcacacagttggtgcctgaccccacagaaattgcaacaccttgaacagctcagggcaaacagaaataatctcaacccggcccagaagcttatgctcgagcagcttgagagtcaatttgtactcatgcagcagcatcagatgaggcctaccggagtggctcaggtgagaagcacaggcataccaaatggccctaccgcagattcaagcctgccaactaattcagtgagtggccagcagccccagttggccctgacgagagtgcctagtgtgtcccagccgggagtacggcctgcttgtcctggccaacccctggcaaacggcccattctctgcggggcacgtgccttgttctacttctaggacccttggttccactgatactatcctcatcggaaacaatcatatcactggctccggatctaacgggaatgtcccatacctgcagcggaatgcgcttaccttgccacataatcgaaccaatctcacctccagtgctgaagagccctggaagaatcagctgtctaatagtacccaggggctccacaaggggcagtcttctcatagcgccggccctaatggcgagagacccctgagtagtaccggcccttctcaacatctccaggcagctgggtccgggatccagaatcagaacggccaccccactctcccaagcaactctgtcacccagggtgcagcacttaaccacctgtcctcacacacggccacctcaggtggtcaacaaggtatcaccctgaccaaggaatccaaaccgtcagggaacatcctcacagtccctgagacctctaggcatactggggaaacccccaatagtacagcctctgtggaagggctgcccaaccacgtgcaccaaatgaccgccgatgctgtgtgctctccaagccacggggattcaaagtcccctggtctgctgtcctccgacaatccacagctgtcagcattgcttatgggaaaagctaacaataatgtgggcaccggtacttgcgacaaggtaaacaatatccatcccgcagtgcataccaaaaccgacaactctgtggccagtagcccttccagcgctatctccacagctactccctcacccaaatccacagagcagaccaccacgaattctgtaacttccctgaatagtccccattcaggacttcacacgatcaatggcgagggaatggaggagtctcaatccccaatgaaaacagacctgcttctcgtcaaccacaagcctagtccacaaataattccctcaatgtccgtcagcatatatccctcctccgcagaggtgctgaaggcttgcagaaacctgggtaagaatggactgtcaaactcttctatcctcctcgacaagtgtcccccacccagaccaccttcaagcccgtaccctcccctcccaaaggataagctcaacccaccaacaccctccatctacctcgaaaacaagagagatgcattcttccctccactgcaccaattttgcactaaccccaataaccccgttactgtgatcagaggactcgctggggcattgaaactggaccttggtcttttttccaccaaaacccttgtggaggcaaacaacgaacatatggtcgaggtcaggactcagctcctccagcccgccgatgaaaattgggatcctaccggaaccaaaaagatttggcactgtgagtcaaatagatcccataccacaattgccaaatatgcacagtaccaggcctcaagctttcaggaatcactccgggaagaaaatgaaaagcgctctcatcataaggaccactcagatagcgaaagcacaagtagtgacaacagtggaagaaggcggaaggggccattcaagaccatcaaattcggtaccaatatagatctgtctgacgataagaagtaa

SEQ ID NO: 367 - DNA, 513 bp, synthetic construct
  source 1..513: mol_type = other DNA
ctcagcggaaagaaggctgcagccgcggccgccgccgcggcagctgccgcaactggaacagaagccggacccgggacagccggggggagtgaaaatggaagtgaagtggcagcgcagcctgctgggctcagtggaccagctgaggttggccccggcgcagtgggggagagaactcctcgcaaaaaagaaccgccccgggcaagcccgccaggcggccttgctgagcctcctggcagcgccggcccccaggccggcccgactgtcgtccctggaagtgcgacaccgatggaaactggtatagccgagaccccagaagggcggcgaacgagccgcagaaaacgagccaaggtggagtatcgcgagatggatgaatctctggcgaacctgagcgaggacgaatattatagtgaagaggagagaaatgcaaaggcagaaaaggagaagaagctgccccccccacctccgcaggcccctccggaggaagagaatgaatccgagcccgaagaaccataa

SEQ ID NO: 368 - DNA, 1722 bp, synthetic construct
  source 1..1722: mol_type = other DNA
aaggttatcatcattggctcaggtgtttctggcctcgccgctgcacgccagctccagagcttcggcatggacgtgactctgctggaagctagggatcgcgtaggaggacgcgtcgccacttttcgcaaggggaactatgtagccgacctgggagctatggtcgttactggtcttggcgggaatcctatggccgtggtgagcaagcaggtcaacatggagttggcaaaaatcaaacaaaaatgccccctctatgaggcaaatgggcaggcggtgcccaaggaaaaagacgagatggttgaacaggagttcaaccgcctcctggaggcaaccagctacctgagtcaccagctcgactttaatgtccttaataataagccagtcagcctcggccaggctttggaagtggtcatccagctccaggagaagcacgtgaaagatgaacagatcgaacactggaagaaaatagtcaagacgcaggaagaactcaaggaactgctgaacaaaatggtcaatctgaaagagaagatcaaggagctccaccagcagtacaaagaagctagtgaagtgaagccccctagagacatcacagctgagttcctggttaagtccaagcatagagacctcaccgccctctgtaaagagtacgacgagctggccgaaacacagggtaaactcgaggagaagcttcaagaactcgaggctaacccgccgtccgatgtgtacctgtctagcagagataggcagatactggactggcattttgccaatctggagtttgccaacgcaacccctctcagcactttgagcttgaaacattgggatcaagatgatgactttgagtttaccgggagccaccttaccgtgcggaatggttattcctgcgtgccggttgccctggccgagggtctcgacattaagttgaacacagctgtacggcaggtccgctacactgcctctgggtgcgaggtcattgccgttaacacacgctctacttcacagacttttatttacaagtgtgatgcagtgctgtgtaccctgcccctgggcgtcctgaaacagcagccaccagccgtgcagtttgtgccccctctcccggaatggaaaacatccgccgtgcagaggatgggattcggcaatcttaacaaggtcgtactgtgcttcgaccgcgtgttttgggatccctccgtcaacctcttcgggcatgttggcagtactactgcctctcgcggcgagctttttctgttttggaacctctacaaagcgcctatcttgctggcccttgttgcaggagaagctgctgggattatggagaacataagtgacgatgtcatcgtgggaaggtgtttggccattctgaaagggatcttcggaagctccgccgtgccccagccaaaagaaactgtagtcagccgatggagagccgatccatgggcgcggggatcttacagctacgtggctgctggatcatccggaaacgattacgatctgatggcgcagcctataactcccggcccttctattcccggtgcgccacagccaatcccccgcttgttctttgctggcgaacacacaatccggaactatcccgctacagtgcacggggccttgctgtctggactgcgcgaggctggcagaattgcagaccagttcctgggagctatgtatacactgccccggcaggccactcccggcgtgcccgcccagcagtcccctagcatgtaa

SEQ ID NO: 369 - DNA, 618 bp, synthetic construct
  source 1..618: mol_type = other DNA
gacgcaaagagcttgactgcttggtcccgcactttggtgacttttaaagacgtgtttgttgatttcacgagagaagagtggaaactgcttgacactgctcagcagatcgtgtatagaaatgtgatgctggaaaattacaagaatcttgttagtctggggtaccaattgaccaagcctgatgtaatcttgcgattggagaagggcgaggagccttggcttgtggagagagaaattcatcaggaaactcaccctgattctgagaccgcattcgagattaaaagcagcgttagtagcaggtccatctttaaggacaaacagtcatgtgatattaagatggaaggcatggcgcgcaacgatttgtggtacctgagtctcgaagaggtttggaagtgtcgcgatcaactcgataagtatcaggaaaatccagagcgccatcttagacaggtcgccttcacccaaaaaaaagtgcttacccaggagcgggtgtccgagtcaggcaaatacggaggtaactgtctgctgcccgcccagcttgtactgcgcgagtatttccacaaaagagactcccataccaagagcctcaagcacgaccttgtgctgaacggacaccaggattaa

SEQ ID NO: 370 - DNA, 219 bp, synthetic construct
  source 1..219: mol_type = other DNA
gttgctggcatgcttggccttagagaagaaaaaagcgaagaccaagatctccagggcctgaaggacaaacctctgaagttcaagaaggtgaaaaaggacaaaaaggaggaaaaggaaggaaagcatgaaccagtgcagccttctgcccatcactccgcagagcccgccgaagcaggaaaggccgaaacttccgaggggtccggtagcgcccccgcctaa

SEQ ID NO: 371 - DNA, 900 bp, synthetic construct
  source 1..900: mol_type = other DNA
cgaggccgaccaaagggcagtggcacaacaaggcctaaagctgcaaccagcgaaggcgtacaagtgaaacgcgtactggagaaatcaccaggtaagctcctggttaagatgccatttcagacgtcccccgggggcaaggccgagggcgggggagccaccactagcacccaggtgatggtgattaaaagacccggtcggaaaagaaaggctgaggctgacccccaggcaattccaaagaagagaggccgcaaacccggcagtgtcgtcgccgccgcagctgccgaggccaaaaaaaaggctgtaaaagagagctccatccgctctgtgcaggaaaccgttctgcccattaaaaagcggaagacaagggagacagtgtccatcgaggtaaaggaagtggtgaaacccttgctcgtatctactctgggggaaaaatccggcaagggcctgaaaacatgtaagtcaccggggaggaagagcaaagagtcatctccaaaggggcgctcctcatctgcctccagcccgccaaagaaggaacaccaccatcatcaccaccacagcgaaagccccaaggcacctgtcccgctgctgccaccactgccgccacccccgccagagcccgagagcagtgaggacccaaccagtcctcccgaacctcaggacttgagcagctcagtgtgcaaggaggaaaaaatgcctaggggcgggagcctggaatccgacgggtgccctaaagagcccgcgaagactcagccggcagtggctactgctgccacggcggcggagaagtataagcaccgaggggagggtgaaaggaaagacatcgtgagttcatcaatgccaaggcctaaccgggaagaaccggtggattccaggactcccgtgactgagagagtgagctaa

SEQ ID NO: 372 - DNA, 1230 bp, synthetic construct
  source 1..1230: mol_type = other DNA
agcgtgagcaccctgaaatcagaggacatcaagatcagacaggactctgtgacaaagctcctgacggacgtgcaactgatgaaggggaaacaggagtgtatggactctaaattgctcgccatgaagcacgaaaacgaggcgctttggagagaagtggcctcccttagacagaagcacgcacagcagcagaaggtggtgaataaactgattcagttccttatttctctggtgcaaagcaacagaatactgggcgtgaaacgcaagatccccctgatgttgaacgacagtggcagcgctcacagcatgccaaagtattctcgccagttttcactggagcatgtccatgggagcggtccttattcagcaccttccccagcctatagcagcagtagcctgtacgcacccgatgccgtggcctcatccggaccaattatcagcgacatcacagagctcgcccctgctagccctatggcatcccccggaggctcaattgatgagaggccactctcatccagccccctcgtgcgggtgaaggaggaacccccttctccgcctcagtccccaagagttgaagaagcttcaccgggaaggcccagttctgtagacaccctcctctctcccacagcactgatagattcaatcctgagagagtctgagcccgcgcctgcctctgtcactgctcttaccgatgctcggggccatacagatacggaagggaggcccccatcaccgcctccgacatccacacccgagaaatgcctctctgtcgcctgtctggacaagaatgagctgagcgaccacttggacgccatggacagtaatctggataacttgcaaacaatgctgtccagccatgggtttagcgtagatacctccgctctgctggatcttttcagccctagtgtcacagtcccggatatgtcactgccagacctcgacagcagcctcgcaagcattcaggagcttttgtccccacaggaacctcctagaccacctgaggctgagaacagtagtccagattctggaaaacagctcgtccattatactgctcagcccttgtttttgctggatcccggctccgtggacaccggctccaatgatctgcctgttcttttcgagctgggagagggcagctacttttctgagggcgacggttttgcagaggatccaactatcagcctcctgaccggttcagagccgcctaaagccaaagatcctacagttagctaa

SEQ ID NO: 373 - DNA, 3441 bp, synthetic construct
  source 1..3441: mol_type = other DNA
gcccacagctgccgatggcggttccccgctcgcccaggtactactggagggggtggcggggggggacgccgcggtctgggaggagcccccaggcagagggttcctgcattgttgcttcccccgggcccacccgtcggcgggggaggccctggagcaccacctagtccccccgcagttgccgccgccgcagccgcagccggctcttccggggccggagttcccgggggtgctgcagcagcatctgccgccagttccagcagtgctagctccagttcctctagttccagctctgcctctagtggacccgccctcttgcgcgtcggccccggattcgacgcagcgctgcaagtctccgctgccattgggaccaacttgagacggttcagggccgtgtttggcgagtccggcggcggtggtggtagtggggaggatgagcagtttctcggatttggtagcgacgaagaggttcgggtgagatcccccactcgcagcccctccgtgaaaacttctccgcggaagcctcgcggccgccctcggagcgggtctgatagaaacagcgccattctctcagaccctagcgtattttcaccactgaacaagtctgagaccaaatcaggggataagataaaaaaaaaggactccaaatccatcgagaaaaaacgaggacgcccacccacgttccccggcgtgaaaatcaaaatcacgcacgggaaagacatcagtgaactgcccaagggaaacaaggaagatagcctgaagaagattaaacgaaccccgagcgcaacgttccagcaggcaaccaagatcaagaaactgagagccggaaagctgagtcccctgaagagcaaattcaagactggcaaactgcagataggaaggaagggcgtgcagatcgtcagacgaagaggacgaccgcccagtactgagcgaattaaaactcctagcggcctccttatcaactccgagctggaaaaaccccaaaaggtgaggaaggacaaagaaggcacgccgcccctgactaaggaggacaaaaccgtcgtgagacagtcccctagaagaatcaagcctgtgaggatcataccatcaagcaaacgcacagacgccaccatagccaagcagctgctgcagcgggccaaaaagggagcccaaaagaagatcgaaaaagaggccgctcaactccagggccgcaaagtgaagacccaagtgaaaaatattcgccagttcatcatgcctgttgtgtcagcaatcagcagccgaatcatcaaaacaccccgacgattcatagaggacgaggactatgacccaccaattaaaattgctcgactcgagagtaccccaaatagcaggttcagtgccccttcctgtggctcatccgagaaatcatcagccgcatcccagcacagtagtcagatgtcttccgattcctctcggtcaagcagtccaagcgtggacacctctactgatagtcaagcgtccgaggagatacaggtgttgccagaggagaggtctgacacccccgaagtccacccacctctgccgatttcccagtcaccagaaaacgagagtaatgaccggaggtcacgcagatatagtgtgagtgagagaagcttcggtagccgcacaacaaaaaagctctcaaccctgcaatctgccccacagcaacagacctcatcttctccccctccacccctgcttactcctcccccaccactccagccagcctcttctatttcagatcataccccttggctgatgccgccgacaattccgctcgcctcaccattccttccagcctctactgccccgatgcagggaaagaggaagtctatcctcagagaacctacttttagatggacaagccttaagcactcacgctctgaaccccagtacttcagttccgctaaatacgccaaagaggggttgatccgcaagcctatattcgataactttaggccaccaccactgactcccgaggatgtgggttttgcttccggattcagcgccagtgggaccgctgcatccgctaggctctttagtccccttcacagtggcactcggtttgacatgcacaaacggtcacccctcctgagagccccaaggttcaccccgagtgaagctcactcaaggatcttcgagtccgtgactctcccctctaatagaacatctgccggtactagcagttctggagtgtccaataggaagagaaagaggaaggttttcagcccaatccgctccgaaccacgatcaccttctcatagtatgcgcaccaggtctggcagattgtcaagcagcgagttgtctccactcactcccccttcatctgtgtcttcctctctgtccattagtgtctcaccgctggctacttccgccctcaaccccacttttacgttcccctcccactcccttacccagtccggggagtctgcagaaaagaaccaaaggcctagaaagcaaacgtctgcccccgccgagccattttcctcttcttctccaaccccgctttttccatggtttaccccgggcagccagacagaacgcgggcggaacaaagacaaagcaccagaagaactcagtaaggatagggatgctgataagtccgtggaaaaggataaatcccgggaaagggacagggaacgggagaaggaaaataagcgcgaaagtcgaaaggagaagagaaagaaaggttcagagattcagagctccagcgcgctgtaccccgtgggaagggttagcaaagagaaggtcgtgggagaagatgttgcaacaagcagttctgcgaagaaggcgaccggacggaaaaaatctagttcacacgatagcggaacagacattacttctgtgactctgggggataccactgctgttaagaccaagattctgatcaagaagggaagaggaaatttggagaaaaccaatcttgacctcggacctacagcccctagtttggagaaggagaagaccctgtgtctctcaactccttcctcctcaactgtcaagcatagcaccagctcaatcgggagcatgctggcccaagcagataagctccccatgaccgataagcgggtggctagcctcctcaagaaggctaaggcacagctctgtaagatcgagaagtccaaatccctcaagcagacagatcagcccaaggcacaaggtcaggagagcgactcctctgaaaccagcgtccggggcccccggataaaacacgtgtgcaggagagccgccgttgcccttgggagaaaacgcgcagttttcccagatgacatgcctaccctgtcagctctgccctgggaggaacgcgagaagattctcagctcaatggggaatgacgacaaaagctcaatcgcaggcagcgaagacgccgaacccctggcccctcccataaagcctatcaaacctgtgaccaggaataaagccccacaggagccacccgtgaagtaa

SEQ ID NO: 374 - DNA, 708 bp, synthetic construct
  source 1..708: mol_type = other DNA
cagaacctgcagtggatgcccagcaaagcctacctgcagaagcaagcaaaagccgtaaagaagaaagagaagaagtccaagacgtccgagaaaaaggattccaaggagagtagtgtggtcaagaacgtggtcgactcaagccagaagcccacccctagcgctagggaagaccctgcgccaaagaagtccagctccgaaccacccccacggaaacccgtggaagaaaaatcagaggagggaaacgtttcagcgcctggaccggaatctaagcaggcgacgacccccgccagtagaaaatccagcaaacaggtttcccaaccggcccttgttatccctccccaaccccccactaccggcccgccccgaaaggaagtgcccaaaaccacacccagtgagccaaagaaaaagcagcccccacctcctgaaagcggacccgagcagtccaaacaaaagaaagtcgctcctagaccctccatccccgtgaaacagaaacctaaagagaaggaaaagccgcctcctgtgaacaaacaggagaatgcaggcactcttaatatactgtctaccttgagcaacggtaacagcagcaaacagaaaatcccggcagacggggtgcatagaattcgcgttgactttaaagaggattgcgaggcggagaatgtgtgggagatgggcgggctgggcattctgacctccgtgccaatcacctaa

SEQ ID NO: 375 - DNA, 789 bp, synthetic construct
  source 1..789: mol_type = other DNA
cctgacactgacgacagacaccgcattgaggaaaagcgaaaaaggacttacgaaaccttcaagagcatcatgaagaagagccctttctccggtcctactgaccctcgacctcctccccggagaatcgctgtaccgagccggagcagcgcttcagtgcccaagcccgcacctcagccttatcccttcacatccagcctgagtaccattaattacgacgaatttccaacgatggtattcccctccggacagatcagccaggcttccgcgctggctcccgccccccctcaggtactgccccaggcccctgcgccggcacccgctcctgccatggtctccgccctggctcaggctccagcccccgtgcctgttctggcccccgggcccccccaggctgttgccccacctgcgccgaaaccgacacaggccggtgaaggtaccctgtctgaggctttgctgcagctgcagtttgatgacgaggatctcggcgcactgctcggaaacagcacggaccccgccgtgtttaccgatttggcctcagtggataatagtgagttccagcaactcctgaatcagggtatacccgtggccccccatactactgaaccaatgctgatggaataccctgaagccataacgagactggtgaccggagcccagcgcccaccggatcctgccccagccccactgggggcgcctggactgcccaacggccttctgtccggagatgaagatttcagctccatcgctgatatggatttctcagcactgctgtcacagatcagctcctaa

SEQ ID NO: 376 - DNA, 969 bp, synthetic construct
  source 1..969: mol_type = other DNA
gcggaaaacgtagtggagccaggaccccccagcgctaaaaggccaaagctctcaagcccagctctgagtgctagcgcttctgacggcacggacttcggatctcttttcgatctcgaacatgacctccctgacgaactcataaatagcaccgaactcggactcaccaatggcggcgatatcaatcagttgcaaactagcttgggcatggttcaagatgccgctagcaaacataaacagcttagtgagctgctgaggtccggatcaagtcccaatctgaacatgggcgtgggcggccctggacaagtgatggcatcacaggcacagcagtctagtcctgggttgggactcatcaactccatggtcaagagcccgatgacacaggccgggctgactagcccaaatatggggatgggcacttccggccccaatcaggggccaacacagagcaccggaatgatgaatagtcctgttaaccaacccgccatgggtatgaacactggcatgaacgcaggaatgaatcccggtatgctggccgcaggaaatggccagggaataatgccaaatcaggtcatgaatggctccattggggcggggcgcggccggcaaaacatgcagtaccctaatcccggcatgggaagcgccggaaacctgcttaccgaacccttgcagcagggaagcccccagatgggcggtcagacaggcttgagggggccacaacccttgaagatgggcatgatgaacaacccaaatccttacggcagtccttatacccaaaacccgggccaacagatcggagcctccggactcggtctgcagatccagaccaaaactgtcctgagtaacaatctttcccctttcgccatggacaaaaaagccgttcccggcgggggaatgccaaacatggggcagcagccagccccacaggtacaacagcctgggctcgtgactcctgttgctcaggggatgtaa

SEQ ID NO: 377 - DNA, 1809 bp, synthetic construct
  source 1..1809: mol_type = other DNA
ttgcggcaacagcagctccagcacagactccagcaggctcagatgttgcggagacggatggcatccatgcagaggacgggtgtcgtgggccaacaacagggtctgcctagccccactcccgccacccccaccaccccgacaggccaacagccaaccacaccacagacccctcaacccactagtcaaccccagcctaccccgcccaactccatgcctccttaccttccacggacacaggcagcaggtccagtgtcccagggcaaggccgccggccaggtgacgccacccacccccccccagactgcacagccaccccttcccggcccccctcctgccgccgtggagatggccatgcagatccagcgagctgccgaaacccagaggcagatggctcacgtacaaattttccaaagaccaatccaacaccagatgccccccatgacaccgatggctcccatgggcatgaatcctccacccatgacccgaggcccgtctggtcacctggaacctggcatgggccctacaggtatgcaacaacaacccccgtggtcacaaggcggtttgccccagccacagcaattgcagtcaggaatgccgagaccagcaatgatgtcagtggcacagcatgggcagcctctgaatatggctcctcagccaggactggggcaggttggcatctcccctctgaagcccgggacagtttcccaacaggcccttcagaatctgctgagaacgttgcgatccccttcatctccgctccaacagcagcaagtccttagcattttgcacgctaaccctcagctcctcgctgcctttattaaacagcgggctgcaaaatatgctaactccaatccccaacctatccccggacaacctgggatgccgcagggccagcccggccttcagccaccaactatgcccggtcagcagggcgtgcattctaatcccgcaatgcagaacatgaaccctatgcaagcgggggtacagagggccggcctgccccagcagcagcctcaacagcagctgcaacccccgatgggcgggatgtccccacaggcacagcaaatgaatatgaatcacaatacaatgccgagccagtttagggatatccttcggagacagcaaatgatgcagcaacaacagcagcaaggggctggtcccggaattggcccgggaatggcaaaccacaatcagtttcaacagcctcagggcgtggggtatccaccccagcagcagcagcgcatgcagcaccacatgcagcagatgcaacaaggcaacatgggccagatcggccagttgccccaggctctgggcgccgaagccggcgcctcattgcaggcctatcagcagcgactgttgcagcagcagatgggctcaccagttcaacccaaccctatgagtcctcaacagcatatgctgcccaatcaagctcagtcaccccacctgcaaggacagcagatcccaaactctctcagcaatcaggttcgcagccctcagcctgtgcccagccccaggccccagtcacagccaccacatagtagcccctcaccccgcatgcagcctcaaccctctccacaccacgttagcccacagacatcaagccctcaccctgggttggtggcagctcaagcaaaccccatggaacagggccacttcgccagtcccgaccagaatagtatgctctcccagctggccagtaatccagggatggccaaccttcatggtgccagtgcaacagatttggggctgtccacggacaacagcgacctcaatagtaatctttcccagtctacactggatatccattaa

SEQ ID NO: 378 - DNA, 477 bp, synthetic construct
  source 1..477: mol_type = other DNA
gggcagacaggcaagaaaagtgaaaaaggtcccgtttgttggcgcaagcgcgtgaagagtgaatatatgcgacttcgacagttgaagcggttcaggagggcagatgaggtgaagagcatgttcagctcaaatcgccagaagatactcgagcgcaccgaaatcttgaaccaggagtggaagcagaggaggatccaacctgtgcacattcttacatcagtcagctctctgcgggggaccagagaatgctccgtgacctccgacttggacttccctacccaagtgattcctctgaagaccttgaacgccgtggcctctgtgcccattatgtactcttggagtccccttcaacagaatttcatggtcgaagacgagaccgttctgcataacatcccgtacatgggcgatgaagttctggatcaggatggcacctttattgaggagctgattaagaattatgacgggaaagtgcatggataa

SEQ ID NO: 379 - DNA, 834 bp, synthetic construct
  source 1..834: mol_type = other DNA
agagtaaaggagagttctattatagcccccgcccctgcagaggatgttgacaccccgccgagaaagaagaagaggaagcaccgactgtgggcagctcactgcagaaagattcagctcaagaaagatggcagtagcaaccacgtatataactatcaaccatgtgatcaccctcgccagccttgcgattcctcatgcccatgtgtgatcgcccagaacttttgcgagaaattctgtcagtgctcttcagaatgtcagaataggttcccaggctgcagatgcaaggctcagtgcaatacaaagcagtgcccctgttaccttgccgtcagagaatgtgaccccgacctgtgcctcacttgtggcgctgccgaccattgggattcaaaaaatgtcagctgcaaaaactgctctattcagcgaggctctaaaaagcatctgctgttggctcccagtgacgtggcagggtggggaattttcattaaggatccagtgcaaaagaatgagttcattagcgagtactgtggcgaaatcattagtcaggatgaggccgaccggaggggcaaggtgtacgacaaatatatgtgcagcttccttttcaacttgaataacgacttcgtcgtagacgcgacacggaagggcaacaagatcagattcgctaaccacagcgtaaatccaaactgctacgcaaaggtgatgatggtcaatggagatcatcggattgggatcttcgcaaaacgggctatccagaccggcgaagaacttttcttcgactatagatactcccaagcggatgccctgaagtatgtgggcattgaaagggaaatggaaattccttaa

SEQ ID NO: 380 - DNA, 816 bp, synthetic construct
  source 1..816: mol_type = other DNA
gcaacccctagagggcgaaccaagaaaaaagcgtctttcgatcattctcccgacagccttccccttcgaagtagcggccgccaggccaaaaagaaagccacggagaccaccgatgaagacgaagacggaggctccgaaaagaaatacaggaagtgcgaaaaggcaggctgcactgccacatgccctgtctgcttcgcctcagcttcagagcgctgcgctaagaatggatatacctcacgctggtaccacctgtcatgtggcgagcacttctgtaacgagtgcttcgatcattattataggtcccataaagatggttacgacaagtataccacctggaaaaaaatatggacctccaatggaaagacggagccaagccccaaggcattcatggctgatcagcaactgccctattgggttcagtgcaccaagcctgaatgcagaaaatggaggcagcttaccaaagaaatacagctgacaccacaaatcgcaaaaacctaccgctgcggtatgaaacccaacacagcgattaagcctgagaccagcgaccactgctctctgccagaggatctgcgagtgttggaggtgagtaaccattggtggtattccatgttgatactcccgccactgctcaaggacagcgtggccgcccccctgctctctgcttattaccctgattgcgtgggaatgagcccatcatgtactagcaccaacagggcagctgccaccggcaacgctagtccaggaaaactggagcactccaaagcagccttgtcagttcatgtgcctggtatgaaccgctattttcagccattttaa

SEQ ID NO: 381 - DNA, 1335 bp, synthetic construct
  source 1..1335: mol_type = other DNA
gactatcacaataagagtgtgatcatcatcggcgctgggccggccggtctggccgccgctagacagctgcacaattttggaatcaaggtgaccgttctcgaggccaaagatcggatcggaggaagagtatgggatgacaagagctttaaaggggtcacggttggtcgaggagctcaaatcgtaaatggatgcattaacaaccccgtggcattgatgtgcgaacaattggggatttccatgcacaagttcggtgagagatgcgatctgatccaggaaggaggaaggataaccgaccctaccatcgacaaaaggatggactttcattttaacgcactgctcgatgtggtgagtgagtggcgaaaagataagacccagctccaagacgtgcccctgggggagaaaatagaagagatatataaggcatttattaaagagtccggcatccagttcagcgaactcgaaggacaggtgctgcagtttcacctgagcaacttggagtacgcctgcggctcaaatcttcatcaggtgagcgcaaggtcctgggatcacaacgaatttttcgcccagtttgccggggaccacacactgcttactcctggctattctgtcatcattgagaagctggctgaaggacttgacatccagttgaaatcaccggtacagtgtattgattattctggagacgaggtgcaagtcaccactacggatgggacagggtactctgcccagaaggtccttgtcactgtcccactcgcgctgcttcagaagggcgcgattcagtttaaccctcccctgagcgagaaaaaaatgaaggccattaattccctgggagctgggattattgaaaaaatagcattgcagtttccgtatcgattctgggattctaaagtccaaggcgcagatttctttggccacgtacccccgtccgccagtaagcgggggctcttcgcggtcttttacgacatggatccgcagaagaaacattccgtgctgatgtccgtgatagctggagaagcagtggcttcagtgcgaacgctggatgacaaacaggtgctgcagcagtgtatggcaaccctgcgggagctgtttaaagagcaggaggttcccgacccaacaaaatatttcgtcacacgctggagcactgatccttggatacaaatggcttatagctttgttaagaccgggggtagtggtgaggcatacgacattattgctgaagatatccaaggtactgtgttttttgctggtgaagctacgaatcggcattttcctcaaactgtcacaggggcttacctcagcggagttagagaagcatctaaaattgccgctttctaa

SEQ ID NO: 382 - DNA, 1752 bp, synthetic construct
  source 1..1752: mol_type = other DNA
agtagaagccgacatgccaggccaagtcgccttgtacggaaggaggatgtgaataagaaaaaaaagaactctcagcttagaaaaaccaccaagggcgccaacaaaaatgtagcaagtgtaaagacattgagcccgggtaaactgaaacagctcatccaggagcgagatgttaagaaaaagaccgagcctaagccccctgtccctgtgcggtccctgctgactcgagccggggctgcaaggatgaacctggacagaacggaagtcctgttccaaaatccagagtccttgacctgcaatggatttacaatggctctcaggtcaacgtccctgtcccgaagactgagccagcctcccctcgtcgttgcgaaaagcaagaaggtacccctgagtaagggactggagaaacagcatgattgtgattataagatcttgcctgccctgggagtgaagcacagtgaaaacgattccgtgcctatgcaagatacacaggtgctcccagacatcgaaaccttgatcggcgtgcagaacccttctcttctgaaaggcaaatcacaagaaactactcagttctggtcacaaagagttgaggactccaagatcaatattccaacgcattcaggtcccgcagcagagatcctgcctggacctcttgaaggcacaagatgcggagagggtctgttctcagaggaaacattgaatgacacctccggttctccaaaaatgttcgctcaggacaccgtctgcgctccattccctcaaagagccactcccaaagtgacctcccagggaaatccatcaatccagctcgaggagctggggtctagggttgagtctctcaaactgtctgattcatatctggatcccatcaagagcgagcacgattgttatcctacctcttcactcaataaagtcattccagatctcaacctgagaaactgtctggcactgggcggctctacaagcccaacctctgtcatcaaatttctcttggccggctctaaacaggctacgctgggagccaagcccgatcaccaagaagctttcgaggcaactgcaaaccagcaggaggttagtgatactactagttttctcggacaggcgtttggtgccatcccccaccagtgggaactgcccggggctgatcccgtgcacggtgaggccttgggagagacgccagacctgcccgaaatccctggagcaatccctgtgcagggtgaggtttttggcacaattttggatcagcaagaaaccctcggcatgtccggatctgtggtgcccgacctgcccgtctttcttcctgttccacctaacccaattgctaccttcaatgcaccaagcaaatggccagaaccccaatccacggtgtcctatggtcttgccgttcagggtgctatccagatcctgcccctcggcagcggccacactccacagtcttctagcaatagtgaaaagaacagcctgcctccagtcatggctatctccaacgtcgagaatgagaaacaggtacatataagtttcctgcccgctaatacccaaggttttcccctcgccccagagcgcggcctctttcacgcgtctctggggattgcgcagctgagccaggcggggccttccaagtccgatcggggcagtagtcaggtgagtgtgacatctaccgtgcacgtggtgaatactaccgtggtgacaatgcctgttcctatggttagcacctcatcctcttcttacacgacactgttgcccacactcgaataa

SEQ ID NO: 383 - DNA, 2385 bp, synthetic construct
  source 1..2385: mol_type = other DNA
gaggaactgaagaagaagccatccgtggttgttccgttggaagtaatcaaagaaaataaaagaccacagagagaaaagaagcccaaagtgctgaaagccgattttgataacaaacccgtgaacggcccaaaaagcgaatcaatggattacagccggtgtggccatggggaggaacagaaacttgaactgaatccccacacggtagagaacgtgacaaaaaacgaagacagtatgactgggatcgaggtggaaaagtggacacaaaataagaagagccagctgactgatcatgtcaagggcgatttttccgctaacgtcccagaggctgaaaagtcaaaaaatagcgaggtcgataaaaagaggacgaagtcccccaagctgtttgttcagactgttaggaatggcattaagcatgtgcattgtttgccagcagaaacaaatgtctcttttaagaaattcaatatcgaagaatttgggaaaacgctggagaataacagctacaaattcctgaaagacaccgctaaccataaaaatgccatgtcctctgtcgcaactgacatgagctgcgatcatctgaaaggcagatctaatgtgctggtgtttcagcagcctggctttaactgcagtagtattccgcactcttcccatagtattataaaccaccatgccagcatccataatgagggagatcagccgaagacccccgagaatattccgagcaaagaacccaaggatggttcacccgttcaacccagcttgctgagcctgatgaaggataggagattgacactggaacaagtggttgctattgaagcacttacacaactctctgaggcaccaagtgagaactccagccccagcaaatccgagaaggacgaggagagtgaacaacgcaccgcgagcttgctgaactcttgcaaggcgatcctctacaccgtgcggaaagacctgcaggatccaaatctccagggtgaaccccctaagctgaatcattgtccttctttggagaagcagagcagttgcaatactgtggtgtttaacggccaaacgaccacactgtcaaattcccacatcaactctgctacaaaccaggcttctacaaagagccacgagtacagtaaggtgaccaactccctgtctctgttcatccccaaatccaattcttccaagatcgataccaataagagcattgcgcaggggattatcacactggacaattgtagtaatgatctgcaccagctgcccccccggaataatgaggtggagtactgcaaccagttgctggactcttcaaagaagctggattccgacgatctgtcatgtcaggacgccacgcacacccagatcgaagaagatgtcgccacgcaactcacccagcttgccagcatcatcaaaattaattacataaagcccgaggataaaaaagtggaatctacacctacttcactcgtcacatgcaacgtccagcaaaagtataatcaggaaaaaggcaccatacaacagaagccccctagttccgtacataacaaccatggatccagcttgacaaagcagaaaaatcccactcagaagaaaaccaagagtactccgagcagagataggagaaaaaagaaacctactgtcgtgtcatatcaagaaaacgacagacagaagtgggaaaagctttcatacatgtacggaaccatttgtgacatctggattgcatctaaatttcagaattttggccagttctgcccgcacgattttccaaccgtgtttggaaaaatttcatcaagcactaaaatctggaagccccttgcccagacacggtccatcatgcaacccaaaactgttttccctcctctcactcagataaagctgcaacgctacccggagtccgcagaggaaaaagttaaggtggagccccttgacagcctttctctgtttcatctcaagactgagagtaatggaaaagcgttcaccgacaaagcttataatagccaagtccagcttacggtcaacgctaaccagaaggcgcaccccctgactcagcccagctcccccccaaatcagtgtgccaatgttatggccggagacgatcagatccgcttccagcaggtggtgaaagaacagctgatgcaccagagactcccgaccctgccgggaatttcacacgagactccattgccagagtccgcactcacactcaggaatgtcaacgtggtatgtagtgggggtatcactgtcgtttctacgaagtctgaagaagaggtgtgtagcagcagcttcgggaccagcgagtttagtaccgtggattccgcgcagaagaatttcaacgattatgctatgaacttctttaccaacccaacgaaaaacctggtatctataaccaaagatagcgagtaa

SEQ ID NO: 384 - DNA, 768 bp, synthetic construct
  source 1..768: mol_type = other DNA
gccgcaaccgaaatctccgtgctgagcgagcagttcaccaagatcaaggagctcgaacttatgcccgaaaaagggctgaaggaggaagagaaagacggagtttgccgggaaaaggatcataggagtccctcagagctcgaggccgagcgcacctccggagcctttcaggatagcgtgctggaagaggaagtggagctggtactggccccaagtgaggagtccgaaaagtacattctcaccctgcagacagtacacttcacgagcgaggccgtcgaattgcaggacatgagtctgctgtccatccaacagcaagagggggtgcaggttgtggtgcaacaacccgggcccgggctcctttggctggaggagggcccaaggcagagtcttcaacagtgcgtcgccatttcaatccagcaggagctgtatagcccgcaagagatggaagtgctgcagtttcacgccctcgaggagaatgtcatggttgcatctgaggattctaaattggcagtctctctcgcggagaccacaggcctcatcaagcttgaagaggagcaggagaagaaccagctcctggctgaacgcacaaaggagcaactctttttcgtggagaccatgtcaggggacgagagatccgacgagatcgtgcttacggtgtctaatagtaatgtcgaggaacaggaggaccaaccgaccgcaggtcaggcagatgctgaaaaagccaaaagtacaaaaaaccagagaaagaccaagggagccaagggaacctaa

SEQ ID NO: 385 - DNA, 270 bp, synthetic construct
  source 1..270: mol_type = other DNA
agcgcagcctccggaaaaggccggcggacccgcaaacggaaacagaccatcctgaaagaagccacaaaaggacaaaaggaagccgccaaaggctggaaagaagccgcaaacggagatgaggcggccgccgaagaagcaagtactactaaaggcgaacagtttccgggagagatgtttccagtggcttgcagagagacaacagcgagagtgaaagaggaggtggatgagggggtgacatgcgagatgctgctgaatacgatggacaaataa

SEQ ID NO: 386 - DNA, 405 bp, synthetic construct
  source 1..405: mol_type = other DNA
gagattccgaaccctcccacctctaaatgcatcacttactggaaaaggaaagtaaagagcgagtacatgagactgcgccaacttaaacgcttgcaggctaatatgggcgccaaagccctgtatgttgctaattttgccaaagtccaagaaaagacccaaatcctgaatgaagaatggaaaaaactgcgcgtgcagcctgttcagagcatgaagcccgtcagcggccatccattcctgaaaaaatgtacaatcgagtctattttccccgggttcgcctctcagcatatgctgatgagatctttgaacaccgtcgcgttggtgcctataatgtatagttggtcccctctgcagcagaacttcatggtagaggacgagacggtcctctgcaacatcccttacatgtaa

SEQ ID NO: 387 - DNA, 822 bp, synthetic construct
  source 1..822: mol_type = other DNA
gaatctcttatcctcaagctgcctaccgatgaactgatgaacccaagtcagaagaagaaaagaaaacacagactgtgggctgcgcattgtagaaagatccagcttaagaaagacaatagttcaacacaggtgtacaactaccagccctgtgaccatcctgatagaccttgtgattccacatgcccttgcataatgacccagaatttttgcgaaaagttttgtcagtgtaatccggactgtcagaacaggtttccaggatgcaggtgcaagacccagtgcaataccaaacagtgcccttgttatctggccgtcagagagtgcgaccccgatctctgccttacatgtggtgcaagcgagcactgggattgtaaggtggtgagctgtaagaactgttcaattcaaagaggactgaagaagcatcttttgctggctccttccgatgtcgcgggttgggggacatttatcaaagaatccgtccagaagaacgagttcatctccgagtattgtggcgagctcatcagccaggacgaggccgacaggcggggaaaggtgtatgataagtacatgtcctccttcctcttcaatttgaacaacgatttcgtggtggacgctacacgaaagggaaataaaatcaggttcgccaaccattccgtgaatcctaattgttatgccaaggtggttatggtgaatggtgaccatcggatcggtattttcgcgaagcgcgcaattcaggcgggcgaagagctctttttcgattatcgatattcccaagcagatgctctgaaatacgtgggcatcgagagggaaactgatgtcctgtaa

SEQ ID NO: 388 - DNA, 2601 bp, synthetic construct
  source 1..2601: mol_type = other DNA
gccgccgcagcgggagcggccgccgccgctgccgccgaaggggaggcaccagccgaaatgggagcgttgctgttggaaaaagaaacaaggggcgccactgaacgagtgcatggttccttgggcgatactcccaggtcagaagagactctgcccaaagcaaccccagactcactcgaacccgcgggcccctcaagcccagcctctgtcaccgtcacggttggtgacgagggcgccgatacacccgttggcgcaactcccctcataggtgatgaaagtgaaaacctggagggggacggtgatctccggggcggccgaatcctcctgggacacgctactaaatccttcccctcctcaccttccaaggggggatcctgtccatcacgcgccaagatgagtatgaccggcgctgggaagagtccaccttcagtacagtctttggctatgcgactcttgtcaatgcccggagctcagggcgctgccgcagccggttctgagcctccccctgcaacgacctcaccagagggacagccaaaggtccatcgggcacgaaaaacaatgtcaaaacctggtaacggtcaaccaccggtccctgaaaagcgccccccggaaatccagcatttcaggatgagcgacgacgtgcactctctgggaaaggttacctctgacctcgccaaacggagaaagctgaacagtgggggcggccttagtgaagagctgggctctgccagacggagcggcgaagtaactctgaccaagggcgaccctgggtccctggaggagtgggaaaccgtcgtcggcgatgacttcagcctttattatgacagctactccgtcgacgagcgcgtcgacagcgacagtaaatccgaggtggaggcgctgactgaacagctgagcgaggaagaggaggaagaagaagaggaggaggaggaggaagaggaggaggaggaagaagaggaggaggaagaggatgaggaatctggcaaccagtccgacagatctggttcaagcggccgacgaaaagccaaaaaaaaatggagaaaggacagcccatgggtgaagccaagtcggaagcggcggaaaagggaaccacccagggctaaggaacctcggggagtcagcaacgatacctcttccttggaaacggaacgcggcttcgaggagctgccactctgcagttgtaggatggaggcaccaaagattgaccgcattagcgagcgggcaggtcacaaatgcatggcgaccgagagtgtggacggggagctgtccggatgcaatgcagccatccttaaaagggaaacgatgcgcccgagttctcgcgttgcactgatggtgttgtgcgagacacaccgggcacggatggtgaagcaccactgttgcccaggctgtggctatttttgcaccgccggaacctttctggagtgtcacccggatttccgcgtcgcccaccgctttcacaaagcgtgtgtaagccagcttaatggcatggtgttttgtcctcattgtggagaagatgcctcagaggcccaagaagtgacaatcccacgaggagacggcgtgaccccacccgccggcaccgcggcaccggctccaccacccctgtcccaggacgtgcccggtagggccgacacttcccaacctagtgcaaggatgcggggtcatggggaaccgcggcgcccgccttgcgatccactcgcagatacaattgacagcagcggcccttctctgaccctgccgaatggaggatgcctgtctgcagtgggtctgcctctcggacctgggagagaggcattggaaaaagccttggtgatccaggagagcgaaagaagaaaaaagctgcggttccatcccagacagctctatctttctgtgaaacagggtgagttgcaaaaggtcatacttatgttgctcgataatcttgacccaaactttcagagtgaccagcagtcaaagcggacccctctgcatgccgcagctcagaaaggctccgtagaaatttgtcatgtgctgctgcaagctggtgccaacatcaacgccgtagataagcagcagcggacaccactgatggaggccgtggtcaacaatcatctcgaagtcgctcggtacatggtccaacgcggcgggtgcgtttattctaaggaggaggatggaagtacctgcctgcaccacgctgccaaaatcggaaatcttgagatggtatcactgctgctttcaaccgggcaggttgacgttaacgcgcaggactcaggaggctggactcccatcatttgggcagcggaacacaaacatatcgaagtgatacggatgctgctcacgaggggggcagatgtcactctgacagacaacgaggagaatatctgccttcactgggcttccttcaccggatccgcagccattgccgaagtgcttctcaacgctcgctgtgacctgcacgccgtaaattatcacggagatacgcctctgcatatcgccgcaagggaatcttaccacgactgtgttcttttgtttcttagccggggggcaaacccagaactgcgcaacaaggaaggagatactgcctgggatctcactccagagcggtcagatgtgtggttcgctctgtaa

SEQ ID NO: 389 - DNA, 1884 bp, synthetic construct
  source 1..1884: mol_type = other DNA
gccgccgccggagctgggcccgggcaggaggcgggggctggtcccggccccggggcggtcgcgaacgccaccggggccgaggagggtgagatgaaacccgtcgctgcaggggccgcggcccctcctggtgaaggtattagtgcagcccccaccgtagaacctagcagcggggaagccgaaggcggagaggcaaacctcgtcgacgtatctggcggcctggaaaccgaatcaagtaacggcaaggatactcttgaaggagccggcgataccagcgaggtgatggatacacaggcaggctctgtcgatgaagaaaatggcagacagcttggcgaagtcgagttgcagtgcggcatttgcaccaaatggttcaccgctgatacattcggtatcgacacgagtagctgtctccctttcatgaccaactactccttccactgcaatgtctgccaccactctgggaatacctactttctgcgcaagcaggctaacctcaaagaaatgtgtttgtctgccctggcaaacctgacatggcagtcaaggacccaagacgagcaccccaaaactatgttttccaaagataaggatatcatcccttttattgacaagtactgggaatgcatgacaactaggcagcggcccggtaaaatgacctggcccaacaacatcgttaagactatgagcaaagagcgggatgtgttcctggtgaaggagcatccagacccaggcagtaaagacccagaggaggactatcctaagtttggccttctggaccaagacctgagcaatataggtccggcctatgacaaccaaaagcagagctccgcggtgtctacctcaggaaatctgaatgggggcatcgccgcaggctcttccggcaaaggtcgcggagcaaagagaaagcagcaagacgggggaacaaccggcactaccaaaaaagctcgcagcgacccactgttcagtgctcagcggctgcccccgcacggttaccccctggagcacccttttaacaaagatggttatcggtatatcctggctgaacccgatcctcacgctccagatcccgaaaaactggaactcgattgttgggccggtaagcctatcccaggagatttgtacagggcctgtctgtatgaacgggtactgctggccttgcacgacagagccccccagctgaagatctctgacgatcgacttacagtcgttggcgaaaagggctactcaatggtgcgagcttctcatggtgtgcgcaagggcgcttggtattttgaaataaccgtggatgaaatgccccccgacaccgcagctaggctgggctggagtcagcccctcggaaatctgcaggcccccctggggtatgataaattctcctacagctggaggtctaaaaagggcaccaagtttcatcagagtatcggcaagcactacagcagtggatatggacaaggcgacgtcctgggcttttacataaacctgcccgaagacactgagaccgccaagtccctccccgacacttataaagataaggcactgataaagttcaagtcctatctgtatttcgaagaaaaagactttgtagataaagctgagaaaagcctcaaacaaaccccccactctgagatcatcttctacaaaaacggcgtgaaccagggtgttgcttacaaagacatcttcgaaggagtttactttccagctataagcctctacaagagttgcactgtgtccatcaacttcggcccctgtttcaagtatccacccaaagacttgacataccggcccatgtctgatatgggatggggggctgttgtggagcatacgctggcggatgtgctctaccacgttgaaaccgaggtggacggcagaagatcccccccatgggagccataa

SEQ ID NO: 390 - DNA, 1983 bp, synthetic construct
  source 1..1983: mol_type = other DNA
gttcttaccctcggcgagagctggcccgtattggtgggcaggagatttctgtccctgtccgccgctgacggctccgacggcagccacgattcttgggacgtcgagcgcgtggcagagtggccatggctgagcggaacgatcagggctgtctctcacacagacgtcacaaaaaaggacctgaaggtttgcgtcgagtttgacggggaatcctggagaaaacggaggtggattgaggtctattctctccttaggagagccttcctggtcgagcataatttggttcttgcggaacgcaagtctcccgagataagcgagcgcatagtgcagtggccagctatcacatacaagcccctcctcgataaagcgggcctgggaagtattacaagtgtgcgctttctgggggaccagcagcgggtgtttctctccaaggatttgctgaagcccatacaagatgttaacagcttgaggctgagtctgacagataaccagattgtgtccaaagaatttcaagccctcattgtaaaacatctggacgagtcccacctcctcaaaggggacaagaacctggtgggctccgaggttaagatctatagtttggatcctagcacccagtggttctccgctaccgtcatcaacggcaatcctgcttccaaaactcttcaggtcaattgtgaggagatccccgcccttaaaattgtcgatccgtccctcatccacgtggaagtggttcatgacaacctggtcacatgcggcaactctgcccggatcggggccgtgaaacgcaagtcaagcgagaacaatggcactctggtttcaaagcaggcaaaatcctgctcagaagcatctccctctatgtgtcctgtgcaaagtgtaccaactacagttttcaaagagatcctccttgggtgcaccgctgcaacccccccaagcaaagatccgcgccagcagagcactccccaagctgccaactctccgccaaacctgggcgccaaaatcccccagggttgccataaacagtctctgcccgaagagattagtagctgccttaacacaaaaagtgaggcacttcggacaaaacccgacgtgtgtaaagcgggactgctctcaaagtcttcccaaatcggaacaggcgatttgaagattctgacagagcccaaaggatcttgcacccaaccaaagaccaataccgaccaggaaaacaggttggagagcgtgccccaggctcttacgggtctgccgaaagagtgtttgcccacgaaagccagcagcaaagccgagcttgaaattgccaatccccctgaacttcaaaagcatctggagcacgccccaagcccaagcgatgtgagcaacgctccagaagttaaggccggagttaacagtgacagccctaacaattgctcaggtaagaaggtggagccctctgccttggcttgccggagccagaacctcaaggagagtagcgtgaaggtggacaatgaatcttgctgctcccgctctaataataagattcagaatgccccatcccgaaaaagcgttctgactgatccagctaagctcaaaaagctgcaacagagtggcgaagccttcgtccaagacgactcatgtgtgaacatcgtcgcccaactgcctaagtgcagggagtgccgcctcgactccctgcggaaagacaaggagcaacagaaagactcacccgtgttctgtcgcttctttcatttccggcgcctgcagttcaacaagcatggcgttctgagagtcgaaggtttcttgacacctaacaagtatgataacgaagccatcgggctgtggctgcccttgacaaagaacgttgtcggcatagacctcgatacagccaagtatatcctcgctaatataggggatcacttctgccagatggttatcagcgagaaggaggctatgtctacaatagagccacaccggcaagtggcctggaagcgggctgtcaaaggcgtgcgcgagatgtaa

SEQ ID NO: 391 - DNA, 2736 bp, synthetic construct
  source 1..2736: mol_type = other DNA
cccgctatgcccagctccggcccaggtgacacctcaagcagcgcggccgagagagaagaggatcgcaaggacggagaggagcaggaggagcctagaggtaaggaggaacgacaggagccaagtactactgcccgcaaagttggcagacctggtagaaagcgaaaacacccgccagttgagtctggtgatacaccaaaggacccagcagtcatttccaagagcccctctatggcccaggatagtggtgccagtgagctgctcccaaacggtgaccttgagaagagaagtgagccgcagcccgaagaaggcagtccagctggcggtcagaagggaggagctcccgcagaaggagagggagccgccgagacccttccagaggcaagtagggctgtggaaaatggatgctgtacacccaaggagggacgcggggccccagcggaggccggtaaagagcagaaagagacaaacattgagtcaatgaagatggaagggagtaggggacggctgcgaggaggactgggatgggaaagttcccttcgccagagaccaatgccgcggctgaccttccaggctggggacccctattatatctcaaaacggaagagagatgaatggcttgccagatggaaacgggaggcagagaagaaggctaaggtgatcgccgggatgaacgctgtggaagagaatcaaggccctggcgagtcccaaaaagtggaagaggcctctccccccgctgtccaacaaccaactgatccagcctcccctacagttgccacaactcctgaaccggtagggagcgacgcaggggataagaacgctacaaaggccggcgatgatgagcctgaatacgaagacggaagaggtttcggaataggggaattggtctggggtaagctgcgagggtttagctggtggcccgggcgcattgtgtcttggtggatgactggaaggagccgagccgcagagggcacacggtgggttatgtggttcggcgatggaaagttttccgttgtatgcgtggagaagttgatgcctctttcaagcttttgttcagcattccaccaggcaacatataacaagcagccaatgtaccgcaaggccatctatgaggtgctccaggtcgcatccagtcgcgctggaaagttgttccccgtctgtcatgatagtgacgagagtgacaccgctaaagcggtcgaagtgcagaataaaccaatgatcgagtgggcgcttggggggtttcaaccgtctgggccgaagggcctggagccaccggaagaggagaaaaatccctataaggaagtgtataccgacatgtgggtagagcctgaggctgccgcctatgcccctccccccccagccaagaagccgaggaagtcaaccgccgagaaaccaaaagtgaaagaaataatagacgagcgcaccagggagcgactggtttatgaggtgagacaaaaatgtagaaatattgaggacatctgcatctcatgtggctctctgaatgttactctggagcatcctctgttcgtggggggcatgtgtcagaattgtaagaactgttttctcgagtgtgcttaccagtatgatgatgacgggtatcaaagctactgtaccatctgctgcggcggcagggaggtcctcatgtgcgggaataataattgttgcaggtgtttttgcgtggagtgcgtcgatcttcttgtcggccccggtgccgctcaagcagcaatcaaagaggatccctggaactgctatatgtgcggtcataagggaacttacggactgttgcggaggcgggaagattggcctagtaggttgcaaatgtttttcgctaataaccacgaccaggaatttgacccacctaaggtctacccccccgttcccgctgaaaagcggaagccaataagggtgctcagtttgtttgatggaatagcgaccggattgttggtcctcaaagatctgggaattcaggtagatcggtatatcgcatcagaggtctgtgaagactctattaccgtgggtatggttcggcaccagggcaagattatgtacgtgggggatgtgcggtcagtgacccagaagcacatacaggaatggggaccttttgacttggtgataggtggttctccctgtaatgatctgtcaattgttaatccagctcggaagggactctatgaaggaactggccgcctgtttttcgagttttaccggctgttgcatgacgcccggccaaaggaaggcgacgaccgcccatttttttggctgtttgagaacgtagtggcaatgggtgttagcgacaaaagagatatcagccggtttctggaaagtaacccggtcatgattgatgccaaagaagtttcagccgctcaccgggctcggtacttttggggaaacctccccggcatgaatcgaccactggcttccacagtcaacgacaaactcgagctccaggagtgtctggagcatggaagaattgctaaattctccaaagtgcgcaccattactacacggagcaatagcataaagcagggcaaggatcaacacttccccgtgttcatgaacgaaaaagaggacatcttgtggtgtaccgagatggaacgcgtcttcgggttccctgtgcattataccgacgtgagcaatatgagtcggctcgctaggcagcgattgctcggacgatcttggagcgtaccggtgattcgacatctgttcgcacccctcaaggaatactttgcctgcgtgtaa

SEQ ID NO: 392 - DNA, 216 bp, synthetic construct
  source 1..216: mol_type = other DNA
gatgcgaagtccctgacggcatggtcccgcactctcgtgactttcaaagacgtctttgtggactttacccgcgaggagtggaagctcctggataccgcccagcagattgtttacagaaacgtcatgcttgaaaactataaaaatctggtctctctgggttatcagttgaccaagccagacgtcattcttaggctggaaaagggcgaggagccctaa

SEQ ID NO: 393 - DNA, 1854 bp, synthetic construct
  source 1..1854: mol_type = other DNA
atctttaagccagaagaactccggcaggcactgatgcccacgctggaggcactttatcgccaggatcctgagtccctgccttttaggcagcccgtcgatccccagcttcttggcattccggattatttcgatattgttaaatctccaatggacttgagtaccatcaagcggaagctcgataccggccagtatcaggagccttggcaatatgtggacgatatctggctgatgtttaataatgcatggttgtacaatcggaagacatcacgcgtgtataaatactgctcaaagcttagcgaggtattcgagcaagaaattgacccagtcatgcaaagtctggggtactgttgtggaagaaaactcgaattcagtcctcaaacgctgtgctgttacggcaaacagctgtgcaccatcccccgagacgccacgtactactcatatcagaatagataccacttctgtgagaagtgcttcaatgagatccagggagagagtgtgagccttggagacgatcctagccaaccgcagacgaccattaataaagagcagttctccaaacggaaaaacgataccttggatcctgagctgtttgtcgaatgcactgaatgtgggcggaaaatgcaccagatttgtgtcctccaccacgaaatcatatggccggccgggtttgtttgcgatggatgtctcaaaaaatccgctagaacgcggaaggagaacaagttttctgccaagaggctcccttccacacgcctgggcacgtttcttgagaaccgggtcaacgattttctgagaaggcagaatcatcctgaaagcggagaggtgacagtccgggtggtccacgcgagcgacaagacagtcgaagtgaagcccgggatgaaggcccggtttgtggactccggagagatggcggaatccttcccatacagaaccaaggccctgttcgcattcgaagagatcgacggcgtggatctctgctttttcggcatgcatgtccaggagtacgggtccgattgtcctccgcctaatcagcgccgagtgtacatctcctacctcgattccgtgcacttcttcaggcctaaatgcctgaggacggctgtgtatcacgagatcctgattggatatttggaatacgtgaaaaagctgggctataccacagggcacatctgggcctgtccaccctcagagggggatgactacatttttcactgtcaccctccggatcagaagattcccaaacccaaacgcctccaggagtggtacaaaaaaatgctggataaagcagtgtctgagagaatcgtgcacgactacaaagatattttcaagcaggcgacagaagaccggctcacctcagccaaagagctgccatactttgagggagacttttggcccaatgtgctggaggaatctatcaaggaactggagcaggaagaagaggagagaaaacgcgaggaaaatacttccaatgagagcaccgacgtgactaagggggacagtaagaatgcaaagaagaagaacaataagaaaacctctaaaaacaaaagctcactttccaggggcaataagaaaaaacctggaatgcctaacgtgtctaatgatctgtcccagaagctttacgctacgatggaaaaacataaagaagtgttctttgtcatccgcctgatagctggaccagctgccaacagcctgccacccatagttgacccagatcctcttattccgtgcgacttgatggatggccgcgatgccttccttaccctggctagagataaacacctggaattctcctcactgcgacgagcgcagtggtccacgatgtgtatgcttgtcgaactgcatacacagagtcaggactaa

SEQ ID NO: 394 - DNA, 906 bp, synthetic construct
  source 1..906: mol_type = other DNA
aatcacgaccaagagttcgatccccccaaggtttacccccccgtcccagccgagaagagaaaaccaataagagtgctgagtctgttcgatggcattgcgaccggcctccttgtgctcaaggaccttggcatccaggtagataggtacattgctagcgaggtgtgtgaggactccataacagtagggatggtgcggcaccagggaaaaatcatgtatgtgggcgacgtcagatccgtcactcagaaacacatccaggaatgggggccctttgacctggttatcgggggctcaccctgtaacgacctctcaatcgtgaatcccgccaggaaaggactgtatgaagggaccggaagattgttttttgaattctatcgcctcttgcacgacgcccgacctaaagagggagatgaccgaccctttttttggctgttcgagaatgttgtggccatgggcgtctctgacaagagggacatcagtaggttccttgagagtaatccagtgatgatcgatgccaaggaggttagtgctgcgcaccgggctcgctatttctggggtaacctgccaggcatgaatagacccctggcttccaccgtaaatgataagctcgagttgcaggaatgccttgagcacggtcgaatcgccaaattctccaaggtgaggactattaccacccggtctaacagtattaagcaggggaaggaccaacacttccccgtgtttatgaacgaaaaggaggatatcctgtggtgcactgaaatggaaagagtttttggattcccagttcactatacagatgtgtccaacatgtcccgcctggctagacagcgcctgctgggacgatcctggtctgtgccagtaatacgacacctctttgccccattgaaggagtactttgcatgcgtgtaa

SEQ ID NO: 395 - DNA, 1551 bp, synthetic construct
  source 1..1551: mol_type = other DNA
gacgccttggacgactttgacctcgatatgctggggagtgacgcccttgatgatttcgacctcgacatgctgggatctgacgccctcgatgacttcgaccttgacatgctgggtagtgatgctctggacgatttcgacctggatatgcttatcaactccagaagctccggtagcggatctcagtaccttcctgacaccgacgaccgacaccgaattgaggagaagcgcaagaggacgtatgagactttcaagagcatcatgaagaagtcacctttttctggtcccaccgaccccagaccgcccccacggaggattgctgttcccagcagatcaagtgcatcagttcctaagcctgctcctcagccctaccccttcacctcctccctctccacaatcaattacgatgagttcccaacaatggtgtttccttcaggacagatctctcaggcttccgcgctggctccagcccccccccaggttcttcctcaggccccagccccagcccccgcacccgccatggtatcagcactggcccaagccccggcgccagttcccgttcttgcccctggccctccgcaagctgtggcccccccagcgccaaagccaacccaagccggcgaaggcaccttgtcagaggctcttctgcagcttcagtttgacgatgaggatctcggggcactcctgggtaactcaactgaccccgccgtgtttacagacctggcatccgtagataattcagaatttcagcaacttcttaaccagggtatccccgtggcaccgcacaccaccgagcctatgcttatggagtaccctgaggcaataaccagactcgtcaccggtgctcagcggcccccagatccagcacccgcccctctgggggctccagggttgcctaacggactcctgtccggcgacgaagatttcagttctatcgctgacatggatttttccgcgcttctcggctctggaagcggttcaagagacagccgcgagggcatgttccttcccaaaccagaggctgggagcgcaatcagtgatgtgtttgagggcagggaggtatgtcagcccaaaaggatccgaccttttcacccccctgggagcccatgggccaacaggccgctcccggcctcattggccccaaccccgaccggacctgttcacgagccagtgggatcccttacccccgctcccgtgccacagccccttgaccccgctccggcagtgacaccagaagcgtctcacctgctggaggacccggatgaagagacttctcaggccgtgaaagcgctccgggagatggccgatacagtgatccctcagaaggaagaagccgcaatctgcggccagatggacctctcccaccctcctcctcgcggacatctggacgaactgaccactaccctcgaatcaatgacagaggatctgaatctcgacagccctttgacaccagagctgaacgagattcttgacactttcctgaacgatgagtgtctgctgcatgcgatgcatatttccaccgggctttctatctttgatacatctctgttttaa

SEQ ID NO: 396 - DNA, 2157 bp, synthetic construct
  source 1..2157: mol_type = other DNA
ctgcccacctgcagctgtcttgatcgagttatacaaaaagacaaaggcccatattatacacaccttggggcaggaccaagtgttgctgctgtcagggaaatcatggagaataggtatggtcaaaaaggaaacgcaataaggatagaaatagtagtgtacaccggtaaagaagggaaaagctctcatgggtgtccaattgctaagtgggttttaagaagaagcagtgatgaagaaaaagttctttgtttggtccggcagcgtacaggccaccactgtccaactgctgtgatggtggtgctcatcatggtgtgggatggcatccctcttccaatggccgaccggctatacacagagctcacagagaatctaaagtcatacaatgggcaccctaccgacagaagatgcaccctcaatgaaaatcgtacctgtacatgtcaaggaattgatccagagacttgtggagcttcattctcttttggctgttcatggagtatgtactttaatggctgtaagtttggtagaagcccaagccccagaagatttagaattgatccaagctctcccttacatgaaaaaaaccttgaagataacttacagagtttggctacacgattagctccaatttataagcagtatgctccagtagcttaccaaaatcaggtggaatatgaaaatgttgcccgagaatgtcggcttggcagcaaggaaggtcgacccttctctggggtcactgcttgcctggacttctgtgctcatccccacagggacattcacaacatgaataatggaagcactgtggtttgtaccttaactcgagaagataaccgctctttgggtgttattcctcaagatgagcagctccatgtgctacctctttataagctttcagacacagatgagtttggctccaaggaaggaatggaagccaagatcaaatctggggccatcgaggtcctggcaccccgccgcaaaaaaagaacgtgtttcactcagcctgttccccgttctggaaagaagagggctgcgatgatgacagaggttcttgcacataagataagggcagtggaaaagaaacctattccccgaatcaagcggaagaataactcaacaacaacaaacaacagtaagccttcgtcactgccaaccttagggagtaacactgagaccgtgcaacctgaagtaaaaagtgaaaccgaaccccattttatcttaaaaagttcagacaacactaaaacttattcgctgatgccatccgctcctcacccagtgaaagaggcatctccaggcttctcctggtccccgaagactgcttcagccacaccagctccactgaagaatgacgcaacagcctcatgcgggttttcagaaagaagcagcactccccactgtacgatgccttcgggaagactcagtggtgccaatgctgcagctgctgatggccctggcatttcacagcttggcgaagtggctcctctccccaccctgtctgctcctgtgatggagcccctcattaattctgagccttccactggtgtgactgagccgctaacgcctcatcagccaaaccaccagccctccttcctcacctctcctcaagaccttgcctcttctccaatggaagaagatgagcagcattctgaagcagatgagcctccatcagacgaacccctatctgatgaccccctgtcacctgctgaggagaaattgccccacattgatgagtattggtcagacagtgagcacatctttttggatgcaaatattggtggggtggccatcgcacctgctcacggctcggttttgattgagtgtgcccggcgagagctgcacgctaccactcctgttgagcaccccaaccgtaatcatccaacccgcctctcccttgtcttttaccagcacaaaaacctaaataagccccaacatggttttgaactaaacaagattaagtttgaggctaaagaagctaagaataagaaaatgaaggcctcagagcaaaaagaccaggcagctaatgaaggtccagaacagtcctctgaagtaaatgaattgaaccaaattccttctcataaagcattaacattaacccatgacaatgttgtcaccgtgtccccttatgctctcacacacgttgcggggccctataaccattgggtctaa

SEQ ID NO: 397 - DNA, 921 bp, synthetic construct
  source 1..921: mol_type = other DNA
tggaaactccagctgcatgaacttacaaagctgccagcctttgtgcgggtcgtgtccgcaggtaatctgctgagccatgtgggacatacaatccttgggatgaacacagtacagctgtatatgaaagtgcccggctccagaacccctggccaccaggagaataacaacttctgttctgtcaatatcaatattggtcccggtgactgtgagtggttcgtcgtgcccgagggatattggggagtattgaacgatttctgcgaaaagaacaatctcaacttcctgatgggctcctggtggcccaaccttgaagacctgtacgaggcaaacgtgccggtctacagattcattcaacgccccggcgacctcgtctggattaatgcagggactgtccactgggtccaggccatcggttggtgtaataacatagcttggaatgtgggaccactgactgcatgccagtacaagttggccgtggagcggtatgagtggaacaagttgcagagcgtgaaatccatcgtgccgatggtgcacctgtcctggaatatggccagaaacataaaagtgtccgatcctaagctgttcgagatgattaagtactgtttgcttcgcactctcaaacaatgtcagaccttgcgcgaggccctgatcgccgcaggcaaagaaattatctggcacggccgaaccaaggaggagcctgcccattattgttcaatatgtgaagtagaagtttttgacctgctttttgtgaccaacgaatcaaattcaaggaaaacctatatagtgcactgtcaggattgcgctaggaaaacaagtgggaatttggaaaactttgtagtgcttgagcagtataagatggaagacctcatgcaggtgtatgatcagtttacactcgcaccccctctcccaagcgcatcttcataa

SEQ ID NO: 398 - DNA, 930 bp, synthetic construct
  source 1..930: mol_type = other DNA
cagctgaaccggaaactgcggcttggcgtggggaatcgcgcgatccgaaccgagaagatcatttgcagggatgtggccaggggatatgagaatgtgccgattccttgcgtgaatggagtcgacggtgaaccttgcccggaggattataaatacatttctgagaactgtgagacttccactatgaacattgaccgcaacataacacaccttcagcattgtacctgtgtggacgattgttccagctctaattgcctgtgcgggcagctcagcatccgctgctggtacgataaggatggtaggcttctccaggagtttaataaaattgagcctcctctgatttttgaatgcaatcaggcttgctcttgctggaggaactgtaaaaacagggtggttcagtcaggaatcaaagttcggctgcagctctacagaaccgctaagatgggctggggcgtgagggctctgcaaaccatcccacaggggacttttatttgtgaatatgtgggtgagctgattagcgacgctgaggccgatgtacgggaggatgacagctacctgttcgacctcgacaataaagatggggaggtatattgcatcgatgccagatactacggcaacatctcccgcttcatcaatcacttgtgtgatccaaacataattcccgtgagggtgtttatgttgcatcaggatctgcgatttccccgcatcgcttttttcagttctcgcgacatccggacaggggaagagcttggatttgattatggggataggttctgggacatcaaatcaaaatatttcacatgccagtgcggatccgagaaatgtaagcactctgctgaggctattgcccttgagcaatctcgactcgctcggctcgacccccaccctgagctcctgcctgaacttggatctctgccacctgtgaacacctaa

SEQ ID NO: 399 - DNA, 1905 bp, synthetic construct
  source 1..1905: mol_type = other DNA
tatcggatgaaaagaaagaattgccagcagggcgcagcatataagaccttttcctggttgaagtgcgtgaagtcacagattcacgagccagaaaacctgatgccaacccagataatcccagggaaggccctctacgatgtcggcgatatcgtgcactccgtgcgcgccaagtggggcattaaagcaaactgcccttgttccaaccgccagttcaaattgttctccaagcccgccagcaaggaagacctgaagcagaccagcctcgcaggggagaagcctacactcggtgctgtactgcagcagaatccaagtgttttggagccagctgccgtagggggtgaagccgctagcaaacctgccgggtccatgaagcccgcctgccctgcgtctacatctcctcttaattggcttgcagatctgacttcaggcaacgtcaacaaagagaacaaggagaaacagcccactatgcctatactgaagaacgaaattaaatgccttccacccctgccacccctctccaagagcagtactgttctgcacaccttcaattctacgattctcacgcccgtctctaacaacaactccgggtttttgcgcaacttgctgaattcctccacgggcaaaacagaaaatggcctcaaaaacacccctaagatcctggacgacatcttcgcaagcctggtccagaacaaaaccacatctgatctgtcaaaacgcccacagggtctgaccattaagccttccatactcgggtttgatactccccattattggctctgtgataatcggctgctctgtctgcaggatccgaataacaagtctaattggaacgtgttcagagagtgctggaagcagggccaacccgtgatggtgagtggcgtccaccacaagcttaactccgagctgtggaaaccagaatctttccggaaggaatttggtgagcaagaagtggacctcgtgaactgtagaactaatgagattataacaggagccacagtgggagatttctgggacgggttcgaggatgttcccaacagactcaaaaatgagaaggaacctatggtgctcaaactgaaggactggcccccaggcgaagatttccgcgacatgatgcctagccgcttcgacgacctcatggctaacatccctttgcccgagtacaccaggagagacggaaagctgaatctcgcttctcgactcccaaactacttcgttcggcccgatctgggccccaagatgtataacgcatatggcctgattacacctgaggacaggaaatatggcacaacaaatctgcacttggatgtttccgatgcggctaacgttatggtgtacgtgggcattcccaaaggacagtgtgagcaggaggaagaggttctgaagaccatacaggacggcgatagcgatgagcttaccatcaaacgctttatagagggaaaagagaagccaggagccttgtggcatatctacgccgctaaggacactgaaaaaatccgcgaatttctgaagaaggtttccgaggagcaggggcaggaaaaccccgccgatcacgacccaattcacgatcagtcttggtatctggaccgctccctgaggaaacgcttgcatcaagagtacggcgtgcaaggttgggcaatagtgcagtttctcggagatgtcgtgtttattccagccggtgcgcctcaccaagtgcacaatctgtactcctgcataaaagtggccgaggattttgtctcccccgaacacgtcaaacattgtttttggctgacacaggaattccggtatctgtcccagacccatactaaccatgaagacaagctgcaagtgaagaatgtaatctaccatgcagtgaaagacgctgtggcaatgctcaaagcaagtgaatctagcttcggcaaaccgtaa

SEQ ID NO: 400 - DNA, 2751 bp, synthetic construct
  source 1..2751: mol_type = other DNA
atggtgcagaaggaaagccaggccacactcgaggaaagggagtcagagcttagttccaatcctgcggccagcgctggcgcctctctggagccccccgccgcacctgctccgggtgaggacaaccccgctggggcgggaggcgccgccgtagctggcgcagccggcggtgctagaaggttcctttgtggggtagtggaaggattctatggcaggccatgggttatggaacaacggaaggaactgttcaggcgccttcagaagtgggagctcaatacctatctgtacgcgcccaaagacgattacaaacacaggatgttttggcgggaaatgtactctgtggaggaagctgagcagcttatgaccctgatcagcgctgcccgcgaatacgaaattgagttcatctacgccatctcccctggactggacatcaccttctccaatcctaaagaggtaagtactctcaaaaggaaactggaccaggtgtcacagttcggctgcaggagcttcgccctgctcttcgatgatatagaccataacatgtgtgccgccgacaaggaagtcttcagctcctttgcccacgctcaagtcagtattacgaatgaaatctatcaatacctgggtgagcctgaaacattcctgttttgtcccacagagtactgcggtactttttgttatcctaatgtgtctcagagcccgtatcttcgaactgttggtgagaaacttctccccggcattgaagttctctggaccggacccaaagtggtgagtaaggagatacccgtcgagagtatcgaagaagtgtccaaaatcatcaaaagagctccggtcatatgggacaatattcacgcaaatgattacgatcagaaaaggttgtttctggggccttataagggcagaagcactgagttgatcccccggctgaaaggcgtcctgacgaatcccaactgtgagttcgaagcgaattacgtagccatacacacacttgcaacttggtacaagagtaatatgaacggtgtgcgcaaggatgtggttatgactgatagtgaggactccaccgtgtcaatccagatcaaacttgaaaatgagggatccgacgaggacattgagacggacgttctttactcacctcagatggcactgaaactcgcgctgaccgagtggttgcaggagttcggtgtgccccaccagtatagctcaagacaggttgcccacagtggagccaaggcctcagtggtggacggaacccccctggtggccgcaccctccctgaatgctaccaccgtcgtgactaccgtgtaccaggaaccaattatgtcccagggagcagctctttccggcgagcccaccacgctgacgaaggaggaggaaaagaagcagcctgatgaggagccaatggacatggtagtcgagaaacaggaggagactgaccacaagaacgataatcagatcctgagcgaaattgtagaggccaagatggccgaagaactcaagcctatggatactgacaaagagagtattgccgaatccaagagtccagaaatgtccatgcaagaagattgtatttctgatatcgccccaatgcaaactgacgagcagaccaataaggagcaatttgtgcccgggccaaatgagaagccgctgtacacagctgagccagtgaccctggaggacctccagcttctggctgacctgttctatctgccctacgagcatggaccaaaaggtgcccaaatgcttagagagttccaatggctgcgggcaaattcatccgtggtgtcagtaaattgtaagggtaaagacagcgaaaagatcgaagagtggaggagcagagcggctaagtttgaagagatgtgtgggcttgtcatgggaatgtttacaagattgagcaactgtgcaaatcggaccattctgtacgacatgtattcttacgtatgggatatcaagtccatcatgagcatggtgaagtcttttgttcagtggctgggttgtcggtctcattccagtgctcagttcctgatcggagaccaggagccctgggctttccgcgggggacttgcgggagaattccagcgcttgttgcctattgacggtgccaatgacctgttttttcagccacctcccctgacccccacatctaaagtctacactatacgaccatactttccaaaggacgaggcatctgtttataaaatctgccgggagatgtatgacgatggggtaggactgcccttccagtcacagcctgatcttattggggataagttggtgggaggtctgctcagcctgagtctggattattgcttcgtgctggaagacgaagacggtatttgtggatacgctctgggcactgtcgacgtgaccccttttattaaaaagtgcaagatctcctggattccgtttatgcaagaaaaatacacgaagcctaacggagataaggaactttctgaagctgagaaaatcatgctctcatttcacgaagagcaagaagtgctccccgagacattcctggcaaatttcccatccttgatcaaaatggacatccacaagaaggtgacagaccctagcgtggccaagtccatgatggcatgtttgctgagctccttgaaagcgaatgggtcccggggcgccttttgtgaggtgcgaccagatgacaagaggattctcgagttctatagcaaactgggatgcttcgaaatcgcaaagatggaggggtttccaaaggacgtcgtcatcctgggaagaagcctttaa

SEQ ID NO: 401 - DNA, 2520 bp, synthetic construct
  source 1..2520: mol_type = other DNA
atgagttcagccgcggagccgccaccccctcccccacctgaaagcgcaccatctaaacccgcagccagtatcgcgtcaggtggttctaattcatctaacaaaggaggccccgaaggagtggccgcccaggctgtggctagcgccgcctccgccggccctgccgatgctgaaatggaggaaatctttgacgacgcctcaccaggaaaacaaaaggaaattcaggagcccgaccctacctatgaggagaagatgcagactgatcgcgctaaccgattcgagtacctcctgaaacagacagagctgttcgcccactttatccagcccgcagctcagaagacccctacctcaccactcaaaatgaaacctgggagacctagaattaagaaggacgagaagcaaaacctcctttctgtgggtgactacagacacagacgcaccgaacaggaagaagatgaggagctgttgaccgaatcctcaaaagctacaaacgtatgcacgaggtttgaagatagtcccagctatgtgaaatggggcaagctgagagactaccaggttaggggcctgaattggctgatttccctctacgaaaatggaattaacggcattcttgctgatgaaatgggcctcgggaaaacgctgcagaccatcagcctgcttggctacatgaaacattacagaaatatccccggtccccatatggttctggtcccaaaatccactttgcacaactggatgagcgagtttaagcggtgggtgccaacgctgaggtccgtgtgcctgattggagataaagaacagagagctgcattcgtccgcgacgtgcttctgcctggagagtgggatgtctgcgtgacgagttatgaaatgctgattaaagaaaagtcagtgtttaagaaattcaactggcggtatctggtgattgacgaggcccacagaatcaagaacgagaagagcaagctgagcgagatcgtgcgggagttcaagacgactaatcgcctgctccttacagggacacctctgcaaaacaatttgcacgagctctggtcactcctcaactttctgcttcctgatgtgttcaactccgccgacgatttcgatagctggttcgataccaataactgtcttggagaccagaagctggtagaaagactgcacatggtgttgcggccattcctgctgagaaggataaaggccgatgtggagaaaagtctgccaccgaaaaaggaggtcaaaatttatgtggggctttccaaaatgcagcgcgagtggtacacccggatcctcatgaaagacatcgatatcctgaacagcgccgggaagatggacaagatgcgactgctgaacattctgatgcaacttcgcaagtgttgcaatcacccataccttttcgacggagcggagcctggtcctccctatacaacagatatgcaccttgtcacaaacagtgggaaaatggttgttctcgataaattgctgccgaagctgaaggaacaggggagccgggtgctgattttttcacagatgacccgagtgctcgacatacttgaggactattgtatgtggaggaattatgagtactgcaggctggatggtcagactccacatgacgaacgccaggatagtatcaacgcatataatgagccaaactctacaaagttcgtgtttatgctgagcacaagagccggcggcttgggaatcaacctggccacagcggacgttgtgatcctttacgactccgactggaaccctcaggtcgacctgcaggccatggacagggcccataggatcggtcagacgaagacagtgcgggtttttcggtttattacggataacaccgttgaggagaggatagtcgagcgagccgagatgaagttgcgactggacagcatcgtcattcagcaggggcgcctcgtggatcagaatctgaacaagattggaaaggatgagatgctgcagatgatccgacacggtgctacccatgtcttcgcgagtaaggagagtgagattactgacgaagacatcgacggcattctggagcgaggagctaaaaaaacagccgagatgaacgaaaagctgagtaagatgggggaatcctccttgaggaacttcaccatggatacagagtccagcgtctataacttcgagggagaagactacagggagaagcaaaaaatcgcctttactgagtggatcgagccccctaagcgcgaaagaaaggcaaactatgcggtggacgcatactttagggaggcactgcgagtgagcgaacccaaagctcccaaggcgccacggccgcccaagcagcctaatgtgcaagattttcaattttttcccccacggttgttcgagctgcttgagaaagagatcctcttttacaggaagaccatcggctataaagttcctcggaaccccgagctgccgaacgccgcccaagcacagaaggaggagcaactgaagatagacgaggctgagagcctcaatgacgaagagctggaagaaaaggagaagctgctgacataa

SEQ ID NO: 402 - DNA, 1341 bp, synthetic construct
  source 1..1341: mol_type = other DNA
aaggaacgggccgtcctcctgcaacggcggaagcgggagaatatgtctgatggcgacacaagtgccaccgaatccggagacgaggtgcctgttgaactgtacacggcctttcagcatactcccacatctattaccctcaccgcctcccgcgtcagcaaagtgaacgacaagagaagaaaaaagtcaggcgagaaggaacagcacatctctaaatgcaaaaaagcttttagagaaggatcccgaaagagttctcgcgtcaaagggtcagcccccgaaatcgatccttcttcagacgggtcaaactttggatgggagaccaagataaaggcttggatggaccggtacgaggaagctaacaacaaccagtatagcgaaggtgtccagcgcgaggctcaaagaatcgcgttgaggcttgggaacggaaacgacaaaaaagaaatgaataagtctgatctcaacaccaataatctgctgttcaaacccccagtagagtcacatatccagaaaaataagaagattctgaagtccgccaaggatctcccacccgacgccctcatcatagaatataggggaaaatttatgctgcgagaacagtttgaagctaatgggtactttttcaagcggccctatccattcgttctgttctattctaaattccacggactggagatgtgtgtcgatgcccgcacgtttggtaacgaggctaggtttattcgccgcagttgcacccccaacgccgaggtgcgacacgaaatccaggacgggacgatccacctgtatatttattctatacactctattcccaagggcactgaaatcaccatcgcatttgattttgactacggcaactgcaaatacaaagttgattgcgcctgtctcaaggaaaaccctgaatgcccggtcttgaaacgaagcagcgaaagtatggagaacatcaattccggctacgaaacgagacgcaaaaaagggaagaaggacaaagatatctccaaggaaaaagatactcagaaccagaatatcacactcgattgtgagggcacaacaaataaaatgaaaagtcccgagacaaaacaaaggaaactgtctcctttgcggttgagtgttagcaataaccaggagcccgacttcatagacgatatcgaagagaaaaccccaatctccaacgaagtggagatggagagtgaggaacagattgccgaacgcaaacgcaagatgacccgggaagagaggaagatggaggctatcctccaggcctttgctcgactggaaaaacgcgagaagaggcgggagcaggccctcgaaaggattagcactgctaagacggaggtgaaaaccgagtaa

SEQ ID NO: 403 - DNA, 1323 bp, synthetic construct
  source 1..1323: mol_type = other DNA
atgcagaagggaaagggcaggacttcaagaatcagaagacgcaagctctgtggttcctcagagtcccgaggagttaatgagagccataagagcgagtttatagagctccggaaatggttgaaggcacggaagttccaggattctaatctggcccctgcctgttttcccgggactggccggggactgatgagccagacaagcctccaggaaggccaaatgattataagtctgcccgagtcttgtctgctcacaactgatacagtcatccgatcatacctgggtgcctacataactaagtggaaacccccaccctctcctctgctggccctttgtacttttctggtgtctgagaaacatgccggccacaggtccttgtggaagccatatctcgaaatactgccaaaagcctacacatgcccagtatgtttggaacccgaggtcgtcaaccttctgcccaagagccttaaagctaaagccgaggagcagagagcccacgttcaagagttcttcgcctcatccagagatttttttagcagcctgcagccgctgtttgccgaagcagtagatagcatatttagttatagcgcccttttgtgggcatggtgtacagtgaacacccgcgcagtatatctcaggccacggcagcgagaatgtcttagtgcagagccggatacttgcgcacttgcaccctacttggacctgttgaaccactccccccacgtgcaagtgaaggctgcgtttaacgaagagacccactcatatgagatcagaaccacatcaagatggagaaaacacgaggaggtctttatatgctacgggccgcacgacaaccagcgcctgtttctcgaatacggctttgtcagtgttcacaatcctcatgcgtgcgtgtatgtctctagggagatccttgttaaatacttgccctcaacggataagcaaatggacaagaagatcagtatcttgaaggaccatggatacatagagaaccttacattcggctgggatggacccagttggagacttctgacagctctgaagctgctgtgtctcgaagcagagaagttcacctgctggaagaaggttttgctgggagaggtgatttctgataccaatgagaagacttccctcgatattgcacaaaaaatttgttactatttcattgaagagaccaatgccgttttgcagaaggtgagccacatgaaggatgagaaggaagcgctcatcaatcaattgacactggtggagtcactgtggaccgaggagctgaaaatcctgagagcctctgccgaaacactgcactctctgcaaacagccttcacttaa

SEQ ID NO: 404 - DNA, 3141 bp, synthetic construct
  source 1..3141: mol_type = other DNA
gcagaattgaaccctaacagcgagtggtttgaaaactatagtttgtgccatcgctgccacaaagcgcaaggcggtcagactatccgcagtgtggctgaacagcatacaccagtatgctccagattcagccctcccgagccgggagacacaccgaccgacgagccggatgctctgtacgtagcatgccagggccagccgaaagggggccacgtgacttcaatgcaacccaaggagccgggtccactgcagtgcgaggccaagcctcttggcaaggctggcgtgcagctcgagccgcaactggaggctcctctgaatgaggaaatgcccctgcttcctcccccagaggagtcccctcttagccctccacccgaggagagccctacttcccctccccccgaggctagtcggctttcaccacctcccgaggagctccctgcctcccctctgccagaggccctgcacttgagcaggcccttggaggaatcacccctctccccaccaccagaggagtcccctctgagccccccccctgaatcctcacccttctccccccttgaggaaagtcctctgagcccgcctgaggaaagccctccatcacctgcgctggaaactcccctgtcacctccccctgaagccagccccctctcccccccattcgaggagtctccactgagtccccctcccgaagaattgcctactagtcctccacctgaggcttctcgactgtctccaccacccgaggaaagccccatgtctcctcctccagaggaaagtccgatgagtccaccccccgaagccagtcgccttttcccacctttcgaggagagcccactgagtccacctccagaagagtctccccttagtcctccccccgaggcatcacgcctttcaccaccaccggaggacagcccaatgtccccgccccctgaggagtccccaatgtctcctccacccgaagtgtcacgactgtcaccacttcccgtagtatctagactgagccctccacccgaggagtctcccctgtctccccccccggaggagagtccaactagcccacccccagaagcctcccgattgtcaccccccccggaagacagccctacctccccccctccagaagatagcccagctagtccacccccagaggactccctgatgtcactccctctggaagaaagccccttgctgccgctccctgaagagccccaactctgcccacgatcagaaggcccacacctgagcccgcgcccagaagaaccccaccttagccccaggccagaggagccacatctttcaccgcaggctgaagaaccgcatctgagtcctcaacccgaagaaccatgcctctgtgccgttcccgaggaaccgcatctgtcaccccaagccgagggcccacacttgtcaccacagccagaggaactgcatctgagcccgcagacagaggaacctcacttgagcccggtccccgaggaaccatgcctgagtccgcaacccgaggagagccacctgtctcctcagagcgaagaaccctgcctgtcccccaggcctgaggagagccacctctctcctgaactggaaaagccaccactctcccctcgccctgaaaaaccgcccgaggagcctgggcagtgccccgctccagaggaactgccactgttcccccctcccggagagccctccctgagccctttgctcggagagccagcactgagcgagcctggagagccccccctcagccccctccctgaggagctgcccctctcaccttctggcgagccctctctgagcccacagcttatgcccccagacccattgcctcctccactttctcccattattaccgccgccgctccacccgcactctctcccctgggggaactggagtaccctttcggcgctaaaggggatagcgaccctgaaagccccttggccgctcccatcctcgaaacacctatcagcccaccacctgaggcaaactgtactgaccctgagcccgttccacctatgatcctgcctccgagcccagggtccccagtgggaccagcttcccctattctgatggaacctctcccacctcagtgctcacccctgctgcagcacagtctcgtgccacagaacagtcccccatcccaatgcagccctcctgccctgccattgagtgtgccaagtccattgtctcctattggcaaagttgtgggggtgtccgacgaagctgaactgcatgagatggagactgaaaaagtgagcgaaccggagtgccctgccctggagccctctgccacgagccccctgccatcccccatgggagatctgagttgccccgcgccctctccggcccccgctttggatgacttctccggactcggtgaagataccgcaccacttgacggaatcgacgcacccggttcacagcctgagcctggtcaaacccctggaagcctggcttcagagttgaagggctctcccgttctgctggacccagaagaactcgctccagtgacacccatggaggtataccctgagtgcaagcagacggcaggccaaggctctccttgcgaagagcaggaagagcctcgagcccctgtagcacctacacctcctacactcatcaagagcgatatcgtgaacgaaatctccaacttgtctcagggggatgccagcgcaagcttccccggcagcgagcctctgctgggttcccccgatccagaaggcggtgggtccctgagcatggaactgggagtgtccactgacgtaagtcctgcccgcgacgaggggtctctgcggctgtgtacagactcattgcctgaaaccgacgattccttgctgtgcgacgccggcactgcaattagcggcggaaaggccgaaggcgaaaaagggagaagacgatctagccccgctagatcccgcatcaagcagggcagatcatcctccttccctggaaggagacgacccagaggtggagcccatggtggccgcgggcgcggtcgggccagacttaagagtaccgctagctctattgagactttggttgtcgccgatatagacagctcccccagcaaggaagaggaagaagaggacgacgacacaatgcagaacacggtggtactgttctccaatactgataagttcgttctgatgtaa

SEQ ID NO: 405 - DNA, 651 bp, synthetic construct
  source 1..651: mol_type = other DNA
gggcggcatccacttatggagctccccctgatgataaatcctacggggtgtgcaaggtcagagccaaagatcctgactcactacaaacgaccacatactctgaatagcacgagcatgtccaaggcgtaccagagcacatttaccggcgaaacaaacacaccttattcaaaacagtttgtccacagcaagagctcacaataccgcaggcttaggacagaatggaagaacaacgtttacctggcacgcagtagaattcaggggttggggctgtatgctgcaaaggacctggagaaacacactatggtgatcgagtacattggcactattatcagaaatgaagttgcaaatcggcgcgaaaagatatacgaggaacagaatcgcgggatttatatgttcagaatcaacaacgaacacgtgatcgacgcgaccctcaccggggggccagcgaggtatattaaccactcttgtgcccctaattgcgttgctgaggtggtgacctttgataaagaggataagattatcattatctccagtcgccgcatccctaagggcgaagagctgacttatgactatcagttcgactttgaagatgatcaacataaaatcccctgtcattgcggcgcctggaattgccggaagtggatgaactaa

SEQ ID NO: 406 - DNA, 1548 bp, synthetic construct
  source 1..1548: mol_type = other DNA
atggcagcaagggcgggttttcagagcgttgcaccttccggcggtgcgggcgcctcaggaggggcaggcgcagcagcagcacttggccctggtgggacaccaggaccacccgtcaggatgggacccgcaccagggcaaggactgtatcggtcacccatgcccggagcggcctatcctagacccggaatgttgccaggcagtcggatgaccccccaaggcccgtcaatgggcccacccggctacggcggaaatccgtccgtgcggcctggtctggcccagagcggaatggaccagtctcgaaagagacccgccccgcagcaaatacaacaggtgcagcaacaagccgtgcaaaacaggaaccataatgcgaaaaagaaaaaaatggcagataagatcctcccacagcgcataagggaattggttccagaatcccaggcgtatatggacttgcttgcatttgaacgcaaactggatcagaccattatgcggaaacggctggacattcaggaggcattgaaaagaccaattaaacagaaaaggaagttgcgaatcttcatatcaaacacctttaaccctgccaagagcgacgcagaagacggggagggtacagttgctagttgggagctccgcgtggaaggcaggctgctggaagattccgcactgagtaagtacgatgccaccaaacagaagagaaagttttctagcttctttaaaagtctggttatagaactggataaagacctttacggtccagacaatcacctcgtggaatggcacagaacagccacaactcaagaaacagatggcttccaggtgaagaggcccggagacgtgaatgtgagatgtacagtgttgttgatgctcgattatcagcctcctcagtttaagttggaccccagactggctagactcctgggtatacacacacaaactaggccggtgatcatccaggccctgtggcagtacataaagacgcataaactgcaggatccgcacgagagagaatttgttatttgtgataagtacctccagcagatctttgagtcccagcgcatgaaatttagcgaaatcccacaaagactgcacgcccttctgatgcctcccgagccaattattataaatcatgtcatatccgtcgatccaaatgaccagaagaaaacagcttgctatgatatcgacgtcgaggtggacgatacgttgaagacgcaaatgaattctttccttctgtctactgcctctcagcaggagatcgctaccctcgacaacaaaattcatgaaaccatcgaaaccatcaaccaattgaagacccagcgggagttcatgctgagctttgcaagggatccacagggcttcatcaatgattggctgcagtctcaatgcagagacttgaagaccatgactgatgtcgtagggaacccagaggaggaacggcgggctgagttttacttccaaccatgggcccaggaagcagtgtgcagatacttttatagtaaggtccaacagaggaggcaagagctcgaacaggctcttggcattagaaacacctaa

SEQ ID NO: 407 - DNA, 1302 bp, synthetic construct
  source 1..1302: mol_type = other DNA
atggccactagcggcgactgccctcggtctgagtcacagggggaggagcccgccgagtgcagtgaggctggcttgctgcaggagggcgtacagcccgaagagtttgttgctatcgctgattacgcggcaactgacgagactcagttgtcctttttgaggggcgagaagattctgattttgaggcagacaactgcagattggtggtggggggagagagcgggatgctgtgggtacatccctgcaaatcacgtgggtaaacacgtggatgagtacgatcctgaggatacctggcaggacgaggaatacttcggcagttatgggaccctcaagctgcaccttgagatgctggctgatcagccaaggacaactaaatatcactccgtgatcctccagaacaaggaaagtttgacagacaaggtcatcctggacgttggatgtggtactggcatcatctccctgttctgtgcacattatgctcggccccgggctgtgtacgccgttgaagccagtgagatggctcaacatacagggcagctggtgcttcagaatgggtttgccgatattattaccgtgtatcagcaaaaggtggaggatgttgtccttcccgagaaggtcgatgtccttgtatcagaatggatgggcacctgtctgctcttcgaatttatgattgagtcaatcctgtacgcaagggatgcctggctgaaggaagatggagtaatctggccgacgatggcggccctgcacctggtaccctgctctgctgacaaggactatagatctaaggtcttgttctgggacaatgcttacgaattcaacttgagtgccttgaaaagccttgccgtgaaggagtttttttcaaaacccaagtacaaccatatcttgaaacctgaggactgtctttccgagccatgtacaattctgcagctggacatgcgcactgtgcaaataagcgatctggaaactcttaggggcgagttgagattcgatataagaaaagccggtacacttcatggtttcaccgcctggttcagcgtgcacttccagtcccttcaagagggccaacctccacaagtgctcagcacaggaccattccatcccaccactcactggaaacagaccctgttcatgatggacgatccagttcctgtgcacacaggggatgtggtgactggatcagtggtgctccagaggaaccctgtgtggagacggcatatgagcgttgcactctcctgggcagtcactagccgccaagatcctaccagtcagaaagtgggggagaaagtgttccccatatggagataa

SEQ ID NO: 408 - DNA, 369 bp, synthetic construct
  source 1..369: mol_type = other DNA
atgcagttgcagctgggccgggtgaccagggtgcagaagcaccgcaagattttgcgcgcggccagggacctcgctctcgacaccttgatcattgaataccgggggaaggtgatgctgagacaacagttcgaggtaaatggacacttcttcaaaaagccgtacccttttgtgctgttttatagtaagttcaacggcgttgaaatgtgcgtggacgccaggacattcggcaacgatgcccgctttatcagaaggtcttgcaccccaaatgccgaggtgcggcatatgatagcggacgggatgatccatttgtgcatctacgctgtatcagccatcactaaggacgccgaagtgacaatagcctttgattaa

SEQ ID NO: 409 - DNA, 2127 bp, synthetic construct
  source 1..2127: mol_type = other DNA
atgtccggcttgggggactcctctagcgatcctgctaacccagacagtcacaaaaggaaagggagtccttgtgacactcttgcaagcagcacagagaagcgccgccgcgagcaagaaaataaatacctggaggaactggccgagttgctctcagctaacatcagtgacatagattcactgtctgtcaagcctgataagtgcaagatactgaaaaaaaccgtcgatcagattcagctgatgaagaggatggagcaggagaaaagcaccactgacgacgatgtgcagaaaagtgatattagctccagttcccaaggggttatcgagaaggagtccttggggcccctgctgctggaagccctggacggttttttcttcgtggtcaattgtgagggaaggatagtgtttgtcagcgagaacgtcacatcctacctgggttataaccaggaggagttgatgaatacatccgtttactccatcctccacgtgggcgatcatgccgagtttgttaaaaatttgttgccgaaaagcctggtcaacggagtgccttggccccaagaggccacccggcgcaattcccacactttcaattgtcgcatgctcattcaccctccagatgagcctgggaccgaaaaccaagaggcgtgccagcgatacgaggtaatgcagtgtttcaccgtatcccagcctaaaagtatccaggaggatggcgaagactttcagtcatgtctgatctgtattgccaggaggctgccccggcctcccgctatcaccggtgttgaatctttcatgacgaagcaggatacgacaggaaaaatcatcagtattgacacttcctcactgcgcgccgccggccggacagggtgggaggatctggtgcgaaagtgcatctatgcgtttttccaaccccagggtcgggaaccttcctatgctcgacagttgtttcaagaagttatgacaaggggaaccgccagcagcccctcttatagatttatactgaacgatggcacgatgctgtcagcacacacaaaatgcaagctctgctaccctcagagtcccgatatgcagcccttcattatgggcatacatatcattgatcgcgaacatagtggactgagtccacaggacgataccaacagtgggatgtctatcccaagagtgaacccttcagtgaacccatcaatttcccccgcccacggcgtggccaggtcctctaccctgccaccgagcaatagtaacatggtgtccactaggatcaatcggcaacaatcaagcgatttgcacagtagctctcacagcaatagcagtaacagtcagggaagttttggctgttctccaggcagccaaattgtggcaaatgtcgccctgaatcagggccaggcatcctcacagtctagtaaccctagcctgaatttgaataactccccaatggaggggacgggcatctcactggcacagttcatgagtcccaggcgccaggtgacatctgggttggctactcgcccacgcatgcccaataactcctttcccccaaatattagtacactgtccagccccgtgggtatgacgtcttctgcctgcaacaacaacaatagaagctatagcaatattccagtcacaagcctgcagggaatgaacgaggggcccaacaattctgttggcttcagcgcctcatccccagtgctccgccagatgtcctctcagaattccccatctcggctgaacattcagcccgctaaagccgagagcaaggataacaaagagattgctagtatcttgaatgaaatgattcagtcagacaactcatcttctgacggtaagcctctcgactctgggctgctgcataacaacgataggttgtcagacggggacagcaagtactcccaaacctcccacaaactcgttcaactcctgacaactacagcagaacagcagctgagacatgccgatatcgacaccagctgcaaagacgtgctgagttgcaccggcactagcaattctgcctctgctaactcctcaggtggctcttgcccctcttcccacagcagtcttaccgagcgccacaagattcttcatagactcctgcaggaggggagcccctccgacattaccacactgtccgtcgaataa

SEQ ID NO: 410 - DNA, 2202 bp, synthetic construct
  source 1..2202: mol_type = other DNA
ccggacaaaaaggatagcgcttccacatctgtgtctgtcactgggcaggtgcaaggtaactcttccatcaagctggagctcgacgccagcaaaaaaaaagagagtaaggatcatcagttgttgcgctatctgctcgacaaagacgaaaaggacctgcgctccactccaaacctgagtcttgatgacgtgaaggtcaaggttgaaaaaaaagagcaaatggatccttgcaatactaaccctacccccatgaccaaacccacgcccgaggagatcaagctcgaagcacagtcccagttcacagctgatcttgatcagttcgaccagctccttccaactctggaaaaggcagcccaactccccggcctctgtgaaactgacagaatggacggagccgtaaccagcgtcaccattaagagcgaaatcctccctgcatccctgcagtccgccacagcccgccccacctcccgccttaaccgactcccagagctcgaactcgaagctatagataaccagttcggacaaccagggactggagatcagataccctggactaacaatacagtgaccgctatcaaccagagtaagagcgaggatcaatgcatctcctcacagcttgacgaactgctgtgcccccccacaactgttgagggaagaaacgacgagaaggctctgctcgaacagctggttagctttctgtctgggaaagacgaaacagagcttgctgagctggacagagccttgggcatcgataagctggttcaagggggtggcttggatgtgctgagcgaacgcttcccgcctcagcaagcaacaccccccctgatcatggaagaacgccccaacctctatagccaaccctacagctcaccgagcccaacagctaaccttcccagcccattccaaggtatggtgaggcaaaagcccagtctgggcaccatgcctgttcaagtgactcctcctaggggcgcattctctcccggcatgggaatgcagcccagacaaaccctgaatcggcctcctgctgcgccgaaccagctgagactccagttgcagcaacgccttcagggccagcagcaactcatccaccaaaacagacaggctattctgaaccaattcgccgcaacggcccccgtaggcattaatatgagaagcggcatgcaacagcaaatcaccccacagccgcccctgaatgcccagatgctcgcccagcgccagagggagctctattcccagcagcacaggcagcgacagttgatccagcagcagcgagccatgctgatgcgccagcagtccttcggcaacaatctgccaccctcctctggtctgcccgtccagatgggcaatccgagactgccccaaggggcccctcagcagttcccgtatcctcccaattatggtacgaacccgggcactccacccgccagcacctctccattctcacagctggctgcaaacccagaggcctcattggctaatagaaattcaatggtttcccgaggaatgactggaaatattggtggccagttcggtacgggcattaacccccagatgcagcagaatgtctttcagtatcctggtgccggaatggttccccagggtgaggctaatttcgctccctccctgtctcctgggagttctatggttcctatgccaatccctccgccacagtcctctctgttgcagcagacccctcctgcctcaggctatcagagccccgacatgaaagcctggcagcagggcgcaattggcaacaataatgtcttcagccaggcggtgcagaatcagcctacgcctgcgcaacccggtgtgtacaacaatatgtctatcacagtgtccatggccggaggcaatacgaatgtgcagaacatgaatccaatgatggcccagatgcagatgagtagccttcagatgcccggtatgaacacagtttgtcctgagcagataaacgatccagcattgcgccacaccggcctgtactgcaatcagctgtccagcaccgatttgctgaagacagaagctgatgggacacagcaggtgcagcaagtgcaggtgttcgccgacgtacagtgtaccgtaaatctcgtgggaggagacccatatttgaatcagcccggacccctggggactcagaagcctacatctgggccgcagactccccaggcccagcagaaatccctgctgcaacaactgctgaccgaataa

SEQ ID NO: 411 - DNA, 990 bp, synthetic construct
  source 1..990: mol_type = other DNA
atgaccgggaatgccggagagtggtgccttatggaaagcgaccccggggtattcaccgagctcattaaaggatttggctgcaggggtgcacaggtggaggaaatctggagtctcgaaccagaaaacttcgagaagctgaaacctgtgcacggccttatttttctctttaaatggcagccgggagaggagcctgccggttccgtggtgcaagatagccgactggataccatttttttcgcaaaacaggtgatcaacaatgcgtgtgctacgcaagccatagtgtctgttctgttgaattgcactcatcaagacgtgcacttgggcgagactctgagcgagttcaaagagtttagccagagttttgacgctgccatgaaggggctcgctctctccaactccgatgtaatacggcaggtgcacaattctttcgctcggcaacaaatgttcgagtttgacacaaaaacctctgctaaggaagaagatgcatttcacttcgtgagttacgtgccagtgaacggccggctctacgagctggatgggttgagagagggacctattgacctcggggcatgtaatcaggacgattggatctctgcggtccggcctgtcattgaaaaacgcatccagaagtattctgagggggagattcgattcaacctcatggctatcgtgagcgatagaaagatgatttatgagcagaagattgccgagctccagagacagcttgcagaggaagagccgatggatacagatcaaggcaattctatgctgagtgctatacagagtgaggtggccaagaaccagatgctcatcgaagaggaagtgcagaaactcaaacgctacaaaatcgagaacattcggcgcaaacacaattatcttccgttcataatggagctgctgaaaaccctcgctgagcaccaacagctcatccctctcgtcgagaaagctaaggagaaacagaacgcaaaaaaggcacaggagactaagtaa

SEQ ID NO: 412 - DNA, 2013 bp, synthetic construct
  source 1..2013: mol_type = other DNA
atggcagagaacctgttggacggacccccgaatcctaagagggccaaactgagctctccaggttttagcgcgaatgactccacagactttggtagcttgttcgacttggagaacgatctgcccgacgaactgattccgaatggtggcgaactgggccttctgaatagcggtaatctggtgccggacgcggcgtctaagcataagcagctttccgagcttctgagaggcggtagcggctccagcatcaatccgggaatcggaaacgtttctgctagctccccagtgcagcaggggctgggagggcaggcccagggccagcccaactcagccaatatggcatccctgtcagctatgggcaagtcacccctctcccagggcgacagctccgcgccttctctgcccaagcaggccgctagtaccagtggaccaacccctgctgccagccaagccctgaacccacaggctcagaagcaagtggggcttgctacatccagccctgcaactagccagactggacctgggatctgcatgaacgccaatttcaaccagactcaccctggcctgctgaattccaactcaggccattccttgattaaccaggcctctcagggccaggcacaggtgatgaatgggtctttgggtgctgccggacgggggagaggtgctggcatgccttatcccaccccggccatgcagggagccagtagttcagtgttggcagagaccctgacgcaggtgtcaccccagatgaccggtcacgccggcctgaatacggcccaagccggcggtatggccaaaatgggcattacagggaacactagtcctttcgggcaaccattcagtcaggccggcggacagcccatgggagcaacaggagttaaccctcagctcgctagcaagcagtccatggtgaactccctgcctactttccccactgacattaagaacacctccgtcactaatgttcctaacatgtcccagatgcagacatcagtgggaatagtccccacccaggcgattgctaccgggcccacagccgaccccgagaaacgaaaactgattcaacaacaattggttctgctgctgcatgctcataaatgtcagcggcgggagcaggcaaacggtgaggttagagcatgcagcctccctcactgtcgaaccatgaagaacgttctgaatcacatgacccactgtcaggccggcaaggcatgccaggtagctcattgtgcctcatctaggcagattatctcacactggaaaaactgtacaagacacgattgtccggtctgtttgcctcttaaaaatgccagcgataagcggaaccaacagacgatactgggcagccctgctagtggcatacaaaatacgattggaagcgtcggcaccgggcaacaaaatgccacaagcctgtccaacccaaacccgatcgacccctcctccatgcagagagcctatgcagccctgggactgccttacatgaatcagccgcagactcagttgcagcctcaagttccaggtcagcaacccgcgcagccacagacccatcaacagatgaggacgctgaatcccctggggaacaaccccatgaacataccggccggtggcatcactacagaccagcagcctcccaacctcattagtgaatctgccctccccacttcccttggcgcgaccaatccgctcatgaacgacgggagtaactccggaaatatcgggaccctctctacaattcctacagcagcacccccctctagcacaggcgtgcgcaaggggtggcacgagcacgtgacacaggatctcagatcccatttggtccacaagctggtgcaggcgatcttcccgacgcctgatccagctgcattgaaggataggcggatggaaaatttggttgcgtacgccaaaaaagttgagggagacatgtacgaaagcgctaactcacgcgacgagtattatcatctcctggccgaaaaaatctacaaaatacagaaagaactcgaggagaagaggagataa

SEQ ID NO: 413 - DNA, 1509 bp, synthetic construct
  source 1..1509: mol_type = other DNA
tgctgcggccgcaaatacgaattttctcctcagaccctctgttgttatgggaaacagctgtgcaccataccacgggacgccgcatactattcatatcaaaaccgctatcacttttgcgagaagtgctttaccgagatccaaggtgaaaacgttacacttggagatgatccgtctcagccacaaaccaccatcagcaaagaccaattcgaaaaaaagaagaatgataccctggaccccgagccttttgtggattgtaaggagtgtgggagaaaaatgcaccaaatctgtgtgctgcactacgacattatctggcctagtggctttgtgtgcgataactgcttgaagaaaactggacgcccacgcaaggaaaacaagttttcagccaagagacttcagactactcgactgggtaaccatctcgaggacagagtgaacaagttcctgcgccgccagaatcacccagaagccggtgaggtgttcgtaagagtggtggcctctagcgacaagactgttgaggtcaaaccaggtatgaagagcaggtttgttgacagcggagagatgtctgaaagttttccatatcgcaccaaggcactgtttgcatttgaagagatagacggggtagacgtctgcttttttgggatgcatgtgcaagagtatggatccgattgccctccccctaatacccgaagggtttacatttcatacttggatagcattcattttttcagaccaagatgcctgcggacggccgtctaccatgagatcctgattggctatctggagtatgtgaaaaagctgggttacgtgaccggccacatatgggcatgtcccccttcagagggggacgactacatctttcactgccatcctcccgatcaaaagattccaaaacctaagcggctgcaagaatggtataagaaaatgctggacaaagccttcgcagagcgcatcattcatgactacaaggacatcttcaaacaagccacagaagacagactgacctctgcaaaggaactgccgtatttcgaaggcgatttttggccaaacgttctcgaggagtccatcaaagagttggagcaggaggaggaagaacgcaaaaaagaggagagtacagccgcatccgaaactacagaaggatcacagggcgactccaagaacgcgaagaagaagaacaataaaaagactaataagaacaaaagcagcatctcccgcgcgaacaaaaaaaaaccgtctatgccaaatgtctcaaatgatctgtcacagaagctctacgccactatggaaaagcataaagaggtatttttcgtgatccacctccatgcaggccctgtgattaatacattgccgcctattgtggaccccgaccccctgctgagttgcgacttgatggacgggagggacgcctttctgaccctggcgagagacaagcactgggagttctcctccctcagacggtccaagtggagtaccctctgtatgcttgtggagcttcacacgcaggggcagtaa

SEQ ID NO: 414 - DNA, 2229 bp, synthetic construct
  source 1..2229: mol_type = other DNA
gatcgctttgtgtacacctgcaacgaatgtaagcatcacgttgagaccaggtggcactgtacggtttgcgaggattatgatctgtgcatcaactgctataacaccaagtcacacgcccacaaaatggtcaaatgggggttggggctcgacgacgagggctcttcccagggtgaacctcagtcaaaatctccccaggagagccggcgcctgtcaatccagcgctgtattcagagcctggtgcacgcctgtcaatgtagaaatgcgaattgtagtttgcctagctgtcaaaagatgaaacgcgtcgtccagcacactaaggggtgtaagagaaagaccaacggcggctgccccgtctgtaaacagctcatcgcactttgttgttaccatgccaaacactgccaggagaataagtgtccagttcccttttgtctgaacattaaacataagttgcggcagcagcagatccagcaccggctccagcaggcccagctgatgcgacggcggatggctaccatgaatacccgcaatgtcccacagcagagtctgcctagcccgacaagcgcaccccccggcactcctacccagcagcccagcaccccgcagacccctcagcctccagcccaaccacaaccaagcccggtaagcatgtcaccagccggtttcccaagcgtcgccaggacccagcccccaaccacggttagcaccggcaagcccacctcacaggtaccagcaccaccccccccggctcaacccccccccgccgctgtcgaagccgcacgacaaattgagagagaagcgcagcagcagcagcacctgtacagagtcaacattaacaacagtatgccacctgggcgaaccggcatgggcacacccgggtcccagatggccccggtgtctttgaacgttccacgaccgaatcaggtctcagggcccgtgatgccatcaatgccaccaggtcagtggcaacaagcccctctgccccaacagcagcctatgccaggactgcccaggccggttattagtatgcaggctcaagctgctgttgccggccctcggatgccaagtgtgcaacctccccggtctatatcaccctctgcactgcaggacctgctgcggacactgaagtcaccgtcatccccccagcaacagcaacaggtgctgaatatccttaaaagcaatccacagctgatggctgcctttataaaacaacggactgccaagtacgtggctaaccagccaggaatgcagcctcaaccaggacttcaatcccagccagggatgcaaccacagcccggcatgcaccagcagccgtcactgcagaacttgaatgcaatgcaggccggggtccccaggccgggagtgcctccacaacaacaggctatgggtggactgaatccgcaggggcaggcgttgaatataatgaatcctggccataatcccaatatggcttcaatgaatccacaatatcgagagatgctcaggcgccagctgttgcagcaacagcagcagcaacagcagcagcagcagcagcaacagcaacagcagcaaggctccgcaggcatggccggaggaatggccgggcacggccaattccagcagcctcagggcccaggagggtatccacccgctatgcaacagcagcagcgcatgcagcagcatctccccctgcaggggtcctcaatgggtcaaatggccgcgcagatggggcagcttgggcagatggggcaacctgggcttggtgccgatagcacacccaacattcagcaagctttgcagcagcggatcctgcagcaacagcagatgaaacagcaaataggctcccctggtcagcccaaccccatgtccccccaacaacacatgctgtcaggtcaacctcaagccagccacttgccaggacagcaaatcgccacttccctgagtaatcaagttaggtcacctgcaccagtccaaagcccccggccacagagccaaccccctcattcttccccctcccccaggatccaacctcagcccagcccccatcatgttagtccacagaccggcagtcctcacccgggccttgcggtgactatggcttctagtatcgatcagggtcacctcggaaaccctgagcagagcgccatgctgccccagttgaatacgccctcccggtcagctctgagtagcgagctgagcctggttggggacaccactggggacaccctcgagaagtttgtagaaggcctgtaa

SEQ ID NO: 415 - DNA, 1278 bp, synthetic construct
  source 1..1278: mol_type = other DNA
atggccgataaagaggctgcctttgatgatgccgtggaagagagagtaattaacgaagaatacaaaatatggaaaaagaacactcccttcctctatgacctcgtgatgacacatgctcttgaatggccctcccttactgcccaatggctgcccgatgtgacacgacctgaaggtaaggacttctcaatacaccgcctcgtgcttggaacgcacacctctgacgagcagaatcacctggtgatagccagtgttcaactcccaaatgacgatgcgcagttcgatgcatcccactacgattccgagaagggtgagtttggtgggtttgggagcgtatccggcaaaattgagatagagataaagatcaatcacgaaggggaggtaaaccgggctcgctacatgccacagaacccatgtattattgccactaaaaccccttcatccgatgtgcttgtgttcgactatacaaagcacccctctaagccagatccatccggcgaatgtaacccagacctgcgcctccgaggacaccagaaggaaggatacggcctgagttggaatcccaacctttctggccacttgctttctgccagtgacgaccacacaatctgcctctgggacataagcgcagtcccaaaggaaggcaaagtcgtcgacgcgaaaacaatcttcactggacatactgcggtggtggaagatgtgtcttggcaccttttgcacgaatctctttttggaagtgtggccgacgatcaaaaactgatgatttgggatacaaggtcaaataataccagcaagccgtctcactctgtggacgcgcatacagcagaggtcaattgtctctctttcaacccgtactctgagttcatactggctactggctccgcagacaaaaccgttgctctctgggacctccggaacctcaaactgaaactccattccttcgagagtcacaaagacgagattttccaggttcagtggtcaccacacaacgagaccatcctcgcatctagcggcacagacaggcgcctgaatgtttgggacctctctaaaattggtgaggaacagagccccgaggacgcagaagatggcccccccgagctgctgttcattcacggcgggcacacagctaagatttccgattttagctggaacccgaatgagccctgggtgatatgttctgttagtgaggacaatattatgcaagtctggcagatggccgagaatatatacaacgacgaggatcctgaaggctctgttgatcccgaaggccagggcagctaa

SEQ ID NO: 416 - DNA, 918 bp, synthetic construct
  source 1..918: mol_type = other DNA
aaagggaaggccatcactcccaaagataataataaaaccctgaaaccagccattgccgaatatatcgtcaagaaggccaaacagcgaattgcgctccagcggtggcaggacgaattgaatagaagaaagaaccacaaagggatgattttcgtcgaaaacacggtggatctggaggggcctcccagcgatttctattatattaacgaatataagcctgcacctgggattagcctggtcaatgaagctacattcggctgcagctgtaccgactgcttcttccaaaaatgctgtcctgcagaggcgggggtgctgcttgcttacaataagaatcagcagatcaagattccccctggcactcctatttatgaatgtaactccaggtgtcagtgtggacctgattgtccaaatagaattgtgcaaaaaggcactcagtactccttgtgtatttttcggacttcaaacggcagaggctggggagtgaaaaccctggtgaagatcaaaagaatgagcttcgtcatggaatatgttggtgaggtcataacatcagaggaggcagagagacggggtcagttctacgataataagggaatcacctacctcttcgatctcgactacgagagcgatgagttcacagtggacgctgcccgctacggcaatgtgtctcactttgtcaatcactcttgtgaccccaatctgcaggtgttcaacgtcttcattgacaatctcgatactcggctgccgcgcatagccctgtttagcacgagaacaatcaatgcgggggaagagctgaccttcgactatcaaatgaaaggaagcggggacatttcctccgactcaattgaccactcacctgcaaaaaaacgcgtgaggacggtctgcaagtgcggagcggttacatgccgcgggtatttgaactaa

SEQ ID NO: 417 - DNA, 1185 bp, synthetic construct
  source 1..1185: mol_type = other DNA
atggggatgaagcattcttcaaggtgcttgctgctgcggagaaagatggccgagaacgcagcagaatctactgaggtgaatagtccaccctcccaacctccacagcccgtggtgccagctaaacccgtccagtgcgttcaccacgtatcaacccaaccatcctgccctggtcggggtaagatgagtaaactcctcaacccagaagaaatgacaagtcgagattactattttgattcctacgcccattttgggatccatgaggagatgctgaaagacgaagttcgcaccctgacatataggaattccatgtaccataataagcacgtatttaaagataaagttgtcctcgatgtagggtctggcaccgggatcctgagcatgtttgcagctaaggctggtgctaaaaaagtgtttggcatagaatgtagttcaataagcgattacagcgaaaaaataattaaggctaaccatctggataatattataacgattttcaagggaaaggtggaggaggtcgaactgcctgttgaaaaggtggatattattatatccgagtggatgggatattgtctgttttatgagagcatgctcaatacggtcatttttgcacgggacaaatggctcaaacccgggggtctgatgttcccagatcgggctgccctgtacgttgtggcgattgaagacagacagtacaaagatttcaagatccactggtgggagaacgtgtacggctttgatatgacatgcatccgagacgtggccatgaaggaacccttggtggatatcgtcgatcccaaacaggtggtaactaacgcttgtttgatcaaggaagtagatatttataccgtgaagacggaggaactgagcttcacctcagcattctgcctgcaaatccagcgcaatgattatgttcacgccttggtcacttacttcaacattgagtttactaaatgtcataaaaaaatggggtttagtaccgctcccgacgctccctatacacattggaagcaaacggtcttctatctggaggactatcttactgtccgcagaggagaggaaatctatggaacgatttctatgaaacctaacgctaagaacgtgcgagatttggacttcaccgtcgacctggattttaaagggcagctgtgtgagacctccgtgagtaacgactataaaatgagataa

SEQ ID NO: 418 - DNA, 2469 bp, synthetic construct
  source 1..2469: mol_type = other DNA
atgaacacagctgaccaagcccgcgtgggccctgcagatgatggcccagctccgagcggcgaagaagagggagagggcgggggcgaggccggcggcaaggaacccgctgccgacgcagcccccgggccatctgctgcattcagactgatggtcactagaagagagcccgcagtcaaactccagtacgcggtcagcggccttgaaccattggcttggtcagaagaccatcgggtaagtgtatcaacagccaggtctattgcggtgcttgagttgatttgcgacgttcataatcccggccaggacctggtgatccatcgcacctcagttcctgcacccttgaactcttgtttgctgaaggtgggttccaagacagaggtggcagagtgcaaagaaaagttcgcagcctccaaggatcctacggtgagccagacctttatgctcgatcgagtctttaaccctgaaggaaaagcactgccacctatgcggggatttaagtacacttcatggtccccaatgggatgtgacgctaatggcagatgcctgctggccgctcttacaatggacaacaggctcacaatccaggccaacttgaatcgcttgcaatgggtgcagctcgttgatttgacagaaatttatggcgagcggctgtatgagacctcttacaggctgtctaaaaacgaagcacctgagggaaacctgggggactttgccgagttccaaaggaggcacagtatgcaaaccccggttcgcatggagtggtctggtatttgcacaacccaacaagtgaagcataacaacgagtgcagggacgttggctcagtcttgctggcagtactgttcgagaacggtaacatagcggtctggcaattccaattgccctttgtgggtaaggaatccatttccagctgcaacacaatcgaatccggtattaccagtccgagcgtccttttttggtgggagtatgaacacaacaataggaagatgtccggactcatcgtcggcagtgccttcggacctattaagattctccctgtaaacctcaaagcggtcaaaggatatttcaccctgcgacagcccgtaatactgtggaaggagatggatcagctgcccgtgcactcaatcaagtgtgtccctctgtatcacccatatcaaaagtgcagttgctctttggttgtcgccgcgagggggagttacgtcttctggtgtctcctgcttatctccaaagccggactgaacgtgcataacagccacgtaaccggcctgcacagcctgccaatcgtctccatgaccgctgacaagcaaaacggcacagtctacacctgttcaagtgacggtaaagtgcgacagctgattccaatctttacagatgtagcccttaagttcgagcatcaactgattaagctgagtgacgtcttcggtagcgtccggacacatggcatcgctgtcagtccctgtggcgcatatctggccatcataactactgagggcatgatcaatggactgcatcccgtgaacaagaattaccaggtgcagtttgttaccctgaaaacctttgaggaggccgctgcccagcttctggagtccagtgtccaaaatcttttcaaacaggtcgatctgattgacctggtgcggtggaagattctcaaggataagcacattccgcagttcctgcaagaggccctcgagaagaaaatcgagagctctggggtaacttatttttggaggtttaaactctttctgctgaggatcctttatcagagcatgcaaaaaacaccttcagaggcgctctggaagcccacccatgaggatagtaagattctcctggttgattcccccggcatgggtaacgctgacgatgaacagcaggaagagggaacctcttcaaaacaggtggtgaagcaagggctccaggagaggtccaaagagggagatgtggaagagcctactgacgatagcttgcctaccaccggcgatgctggcggcagggagcctatggaggaaaaattgcttgaaatacaggggaaaatcgaggctgttgaaatgcacctgaccagagaacatatgaagcgggtgctcggcgaggtttatctgcatacctggatcactgaaaacacatccataccaacccggggtctttgtaatttcctgatgtctgacgaggagtacgatgatcgcactgcccgcgttctgatcggacatatcagcaaaaagatgaataagcagactttcccagagcactgtagtctgtgcaaggaaatcttgcctttcacagacaggaagcaggccgtgtgcagcaacgggcatatttggctgagatgtttcttgacgtatcagagctgccagtctttgatataccggcgctgcctcctccacgacagcatcgcgcggcaccccgcgcctgaggaccctgactggattaagcggctgcttcagagtccatgcccgttctgcgattcccccgttttttaa

SEQ ID NO: 419 - DNA, 840 bp, synthetic construct
  source 1..840: mol_type = other DNA
atggccagcgaactgggtgctagagacgacggaggttgcacggagctcgctaaacctctgtacttgcagtaccttgaaagggccttgcgcctggaccattttctccgacagacctccgctatttttaatagaaacatttcatcagatgatagcgaggatggattggatgactctaatccgctcttgccacagtctggtgacccactgattcaggtgaaggaggaaccccccaacagcctgctcggcgaaacgagcggggccgggtcctcaggcatgctgaatacctactctctgaacggggtgctgcagagtgaatctaagtgcgacaaaggtaatctctataacttctctaaactcaaaaagagccgcaagtggctgaagtccattctgctcagcgacgagagtagcgaggccgattctcagtcagaggatgacgatgaggaagaactgaatctgagtcgggaggagctccataatatgctgcgcctccacaagtacaaaaaactccaccaaaataaatacagcaaggacaaggagttgcagcaataccaatattacagtgctggcctcctgtctacctacgaccccttttatgagcaacagaggcacctgttgggccccaagaaaaaaaagtttaaggaagagaaaaagctcaaggctaagttgaagaaagtgaaaaagaagagacgccgggatgaagaactgtcctctgaagaatctcctagaaggcaccaccatcagacgaaagtgtttgccaaattctctcacgatgccccacctcccggcactaagaagaagcatctgagtatcgaacagttgaatgctagacgccgcaaataa

SEQ ID NO: 420 - DNA, 3111 bp, synthetic construct
  source 1..3111: mol_type = other DNA
taccagctgaaagggatgaactggctggccaacctgtacgagcaggggatcaacggaatccttgcagacgagatgggcctggggaagacagtccagagtatcgcgcttctggctcacctcgccgaacgcgaaaacatatggggtccttttctgatcataagcccggccagcacactcaataattggcaccaggaatttacccgcttcgttcctaagtttaaagtgcttccctactggggcaacccgcatgatcggaaagttattcgaaggttttggtcccagaaaacactctatacacaagacgcccctttccacgtggtcataaccagttatcagcttgtggtacaggatgtcaagtactttcaacgcgtgaaatggcagtacatggtcctcgacgaagctcaggccctcaagagctcatctagtgttagatggaagatactgctgcagtttcagtgtagaaatagactgttgctgacaggtacgcccatacagaacaccatggccgagctgtgggctctcctgcattttattatgcccactctctttgactctcatgaagagtttaacgagtggttcagtaaagatattgagagccatgccgagaacaagagtgctatcgatgagaatcagcttagccgactgcatatgatcctcaagccttttatgctgagacgcataaaaaaagatgtggagaacgagcttagtgataaaatcgagattctcatgtattgtcaacttacttcccgacaaaaattgctgtatcaggccttgaaaaacaaaatttctatcgaagacctgctgcagagctctatggggagcacccagcaagcccaaaacacaacctcatccctgatgaacttggttatgcaatttcgaaaggtctgtaaccatcctgagctcttcgagcgccaggagacatggagcccatttcatattagtttgaagccataccatatatctaaatttatatataggcatgggcaaataagagtgttcaatcatagcagggatagatggttgagagtgttgtccccctttgccccggattacatccagcgaagtttgttccaccgaaaggggatcaatgaggaaagctgtttcagcttcctgagattcatagacatctcccccgccgaaatggcgaatctgatgctgcagggcctcctggccagatggctcgctctgttcctctctttgaaagcatcatatagattgcaccaactcagatcttggggcgcccccgaaggggaaagccatcaaagatatctcaggaataaagacttccttcttggtgtgaatttcccccttagcttccccaatctgtgtagttgcccactcctcaaaagtcttgtgtttagctcacactgtaaggctgtgagcggatactctgaccaagtggtgcatcagagaagatccgccacatccagcctgcgcaggtgcttgctgaccgagctccctagctttctctgtgtcgcttcaccccgcgtaaccgccgtgcctttggattcatactgcaatgataggagcgcggaatatgaacggcgagtgctgaaagagggggggtctctggctgctaagcagtgtctgctcaatggggctccagagctggccgccgactggttgaacaggagaagtcagtttttccccgagcctgctgggggactgtggtcaatccgaccacaaaacggctggagtttcattaggatccccggcaaagagagtctgataaccgattcagggaagctctatgctctcgacgtccttctgacgcggctgaaatcccaaggacatcgggtgttgatttattcccagatgacacgaatgatagatcttctggaggaatacatggtctatcgcaaacatacgtacatgaggctggacggttcttctaaaatctccgaacgcagggatatggtagcagattttcagaacagaaacgacatctttgtcttcctcctgtcaacgcgcgcgggtggcctcgggattaatttgaccgctgccgatacagttatattctacgattcagactggaatcctacagtggaccaacaggcgatggatcgggcccaccgccttggtcagacaaaacaggttactgtgtataggctgatctgtaagggaacaatcgaagagaggattctccagagagcgaaagaaaagtctgaaatacaaagaatggtgatatccggagggaactttaaaccagacacccttaagccgaaggaagtggtgtccctgctgcttgacgatgaggagttggaaaagaaattgagactgagacaggaagaaaaacggcagcaggaagagacgaaccgcgtaaaagagagaaagcggaagcgggagaagtacgcagaaaagaagaagaaggaggatgaattggacggcaaacgccggaaagagggcgtgaacctggtcatccctttcgtccccagcgctgacaactctaacctctccgcagatggagacgattctttcatctctgtagattccgccatgccgtctcccttttctgaaatctccatttcctccgagctgcacaccggaagtatacctctggatgagagcagcagcgatatgctcgttattgtggacgatccagcaagtagcgccccccaaagccgcgctaccaacagcccagcctcaattaccggtagcgtgtcagacactgtcaacggcatctcaattcaagaaatgccagccgctggacgcgggcacagcgcccgcagtcgcggacggcccaaggggagcgggtccaccgcgaagggagccggtaaaggaaggtctagaaaaagcactgcaggaagtgctgctgccatggcaggtgcaaaagccggcgcggctgccgcctctgccgctgcctatgctgcctatgggtacaatgtatctaagggcattagcgcaagctccccactgcaaacctctctcgtccgccctgctggtcttgcggatttcggcccgtcaagcgcatccagtcccctgagcagccctctgtcaaagggtaacaatgttcctgggaatccaaagaatctccacatgacaagttctctcgctcccgacagtttggtcagaaagcagggcaaggggactaacccttctggagggcggtaa

SEQ ID NO: 421 - DNA, 1260 bp, synthetic construct
  source 1..1260: mol_type = other DNA
atggcaggtttcggagccatggagaaattcctcgttgagtataaatcagccgtggagaagaaactggcagagtataagtgcaatacgaatactgctattgaactcaagctggtgcggttccctgaagatctggagaatgatatcaggacttttttcccagagtatacacaccagctctttggagatgatgagacggcctttggctataaaggcctgaagattctgctgtattacatcgctggctcccttagtactatgttcagagtagaatacgcctctaaggtcgacgagaatttcgactgtgtggaggctgatgatgttgagggcaagatccgacagatcatcccccctggcttctgcaccaacactaatgactttctgtcccttctcgagaaggaagtcgacttcaagccctttggcaccctgttgcacacttattcagtgctcagccctacaggtggggagaatttcacgtttcagatttacaaggccgacatgacgtgtaggggatttcgggagtaccacgagcgcctgcagaccttcctcatgtggttcattgaaaccgcttcctttattgatgtcgatgacgagcgctggcactatttcctcgtgtttgaaaagtataacaaagatggtgccaccctgtttgcaactgtgggctacatgaccgtgtataactactacgtgtatcccgataaaacaagaccccgagtctcccagatgctgatcttgacacctttccagggccagggacacggcgcccagctcctggagaccgtacaccgctattacaccgagttccccacggttctggatatcactgccgaggacccgagcaagagttacgtaaaactccgggatttcgtcctcgtaaaactctgtcaggacttgccttgcttcagcagagagaaactgatgcagggattcaacgaagatatggctatcgaggcacaacagaaattcaagatcaacaagcagcacgcaagacgcgtttacgagattctgaggcttctcgtcactgatatgagtgatgccgagcagtaccggtcttatcgactggatatcaaaaggcggctgatttccccgtacaaaaagaagcaaagggacctggctaaaatgcggaaatgtcttcgacctgaggagcttaccaatcaaatgaatcagatcgagattagtatgcagcacgagcaactggaggaatcattccaggaactcgtcgaggactaccgaagggttatcgagagactggcccaggaataa

SEQ ID NO: 422 - DNA, 2658 bp, synthetic construct
  source 1..2658: mol_type = other DNA
atgaagtggctgggagagtccaagaatatggtcgtcaacggccgccgaaatggcggcaagcttagcaacgatcaccagcaaaaccagagcaagctgcaacatactgggaaagatacgctcaaagcaggtaagaacgccgtggaaaggagaagcaatcggtgtaatggcaactccggctttgagggccagtccaggtatgtaccctcctcagggatgtctgctaaagagctgtgcgaaaacgacgacctcgccacaagtttggtactcgacccctacctgggcttccaaacccataagatgaacaccagcgcctttccgtcccgatccagtcggcacttttccaaaagtgatagctttagtcataataaccccgttaggtttcgccccataaagggccggcaggaagaactcaaggaagttattgaacgcttcaagaaagatgagcaccttgagaaagcctttaagtgtctgacgtctggagagtgggctcggcactactttttgaataagaataagatgcaggagaaacttttcaaggaacacgtcttcatatacctgagaatgttcgccacggatagcggcttcgagattctgccctgtaaccgctatagtagcgagcagaacggcgcaaaaattgtagcaacgaaggagtggaaaaggaatgacaagatcgagctgctggtgggatgtattgcagaattgtctgagattgaggaaaatatgctgctgagacacggtgaaaatgacttttctgtgatgtactccactcgcaagaactgtgcacagttgtggctgggtcccgctgcttttatcaaccacgactgcagaccgaactgcaagtttgtctcaaccggaagggatactgcgtgcgtgaaggcactgagagatatagagcccggagaagaaatttcttgttattacggggatggctttttcggcgagaacaacgagttctgcgagtgctatacttgcgagcggaggggaactggcgctttcaagagtagagtcggactgccagcacccgctcccgtgatcaacagcaaatacggacttagggagaccgataagcggctgaaccggctcaagaaactgggggactcctccaagaatagtgattcccagtccgtgtcctctaacaccgacgccgatacaactcaggaaaagaataatgccactagtaaccggaaaagcagcgtgggtgtcaaaaagaactctaagagtaggacactgacccggcagtcaatgtcaagaatacctgctagctctaattccacaagtagtaaactgactcacataaacaatagcagggtgcctaaaaagttgaaaaagcccgctaagcccctgttgagcaaaattaagcttcggaaccattgcaagagactggagcagaaaaatgcaagcagaaaactcgagatgggcaacctcgtgctgaaagagcccaaggtggtgctgtataagaatctccctatcaagaaggataaggagccagagggccctgcccaggcggccgtcgccagcggctgcttgacccggcatgcagctagagaacaccgccaaaatcccgttcggggcgcccactctcagggagaatcctccccctgtacctacatcacaagacgaagtgttcgcacaaggaccaacctcaaggaagcctcagacatcaaactggagcccaacactctcaacggttataaatctagcgttacggagccgtgtcccgactccggggagcagttgcagcccgccccagtactgcaagaggaagagctggcccacgaaacggcccaaaaaggcgaggcgaagtgtcataaaagcgatacagggatgtctaaaaaaaagagtagacagggcaaactggtaaaacagttcgccaaaattgaagaatcaactcctgtccatgatagtcccggcaaggacgatgccgtgcccgacctcatggggccacacagcgatcagggagagcacagcggcaccgtaggggtgcctgtatcttacaccgactgtgcacccagccccgttggatgttcagtggtgacgtcagattcatttaaaaccaaagatagcttcaggactgccaaatcaaagaaaaagaggcggatcacaagatacgacgcccagttgatcttggaaaataactcaggtatccccaagctgacactgagacgccgccacgacagcagcagcaagacaaacgaccaggagaacgacgggatgaatagttcaaagatcagcattaaactctctaaggatcacgataatgacaataacctctatgtggcaaaactgaataatgggtttaatagcggcagtgggtcatctagtacaaaattgaagatccaactgaagcgggatgaggaaaatagggggagttatacagaaggccttcacgagaacggcgtgtgctgtagcgacccactgagcctgcttgagtcaaggatggaggttgatgattacagccagtatgaggaagaaagcaccgatgacagttcctcttctgaaggggatgaggaggaggacgactatgacgatgattttgaggacgattttatacctttgccaccagccaaacgccttagacttattgtcggcaaggacagcatcgatatagatatctccagccgccgcagagaagaccaaagccttagactgaatgcctaa

SEQ ID NO: 423 - DNA, 1257 bp, synthetic construct
  source 1..1257: mol_type = other DNA
atggcagcgtccatgtgcgatgtgttttccttttgtgtgggtgttgctggtcgcgctcgggtttctgtcgaggtaaggttcgttagtagcgccaagggcaaagggctctttgccacccagctcattcgaaagggcgaaactattttcgtggagcgccccttggttgccgcgcagtttctctggaacgccttgtacagataccgcgcttgtgaccattgcctccgggccctggagaaagccgaggagaacgcccagaggctgaccggcaagcctggacaagtgctcccgcaccccgaactgtgtaccgtgcggaaggatctgcatcaaaactgtcctcactgccaggttatgtactgctcagccgaatgcagactggctgctactgagcagtaccatcaggtactgtgccccgggccatctcaagacgatccgcttcaccctctcaacaaactccaagaggcttggcgaagtatacactatcccccagaaacagccagcataatgttgatggccaggatggtcgcaacggttaagcaggctaaagacaaagacaggtggatcagactttttagccagttttgcaataagacggctaacgaggaggaagaaatcgttcataagttgttgggggacaagttcaagggccaactcgagctgctgcgccgacttttcacagaagctctctatgaagaggccgtgagccagtggtttactccggacggtttccgcagtctgttcgctctggttgggaccaacggacagggtatcggcaccagtagcctctctcagtgggtgcacgcttgcgacactttggaactcaaacctcaagatagagagcaattggacgccttcattgatcagctgtacaaggacatcgaagccgccacgggagagttcttgaactgtgagggatcagggcttttcgtgttgcagtcctgttgtaaccattcttgcgttccgaacgctgagacgagtttcccagagaacaacttccttctgcacgtgactgctctcgaggacataaagcctggagaggagatttgtatctcctatttggactgctgtcaaagggaacggtctcgacattctcgccacaaaattctgcgcgagaattacctcttcgtctgcagttgtcctaaatgtctcgctgaagcagacgagccaaacgtaacttctgaggaggaagaagaagaggaggaggaggaggagggtgaaccagaggacgccgagctgggagacgaaatgacagatgtttaa

SEQ ID NO: 424 - DNA, 1467 bp, synthetic construct
  source 1..1467: mol_type = other DNA
atggcgtatagccagggtggcgggaaaaaaaaggtgtgctactattatgacggtgacatcgggaattactattatggacagggtcaccccatgaagccacatagaatcagaatgacccataacctgctgctcaattatggactgtacaggaagatggagatctacaggcctcacaaggctactgcagaggaaatgacaaaataccatagcgacgaatatattaagttcctgcgaagcatacggcccgataacatgtccgagtacagcaaacagatgcagagatttaacgtaggcgaagattgtccggtcttcgacggtttgttcgaattctgccaattgtccacaggaggcagcgtcgctggggcagtgaaacttaacagacagcaaaccgacatggctgtgaactgggccggtggcctccatcatgcgaaaaagtctgaggcaagtgggttttgttacgtgaacgatatagttctcgcaatactggaattgctgaagtatcaccaaagagtcttgtatattgatatcgatatccatcatggtgatggcgtagaggaagccttttacacaacagatagggtcatgacagtttcctttcacaagtacggagaatatttccccgggaccggagacttgagagacatcggcgctgggaagggcaagtactatgccgtgaactttccaatgagggacggcatcgacgacgaaagttatgggcagattttcaaacccatcatcagtaaggttatggaaatgtaccagccctccgcagtagtgctgcagtgtggcgccgactccctgtctggcgacagactggggtgtttcaacctcaccgttaaaggacatgccaagtgcgttgaggttgtgaagacctttaacctgcctctgctcatgctgggaggtggcgggtacaccatcagaaatgtggctaggtgctggacgtatgagaccgctgttgcgttggactgtgaaattcccaacgagctcccttacaatgattacttcgagtatttcggacccgacttcaaactccatatctctccttctaacatgaccaatcagaatactccggagtacatggaaaaaatcaaacaacggctgttcgagaatctgcgcatgctgcctcatgctccaggcgtccagatgcaagcgattcccgaagacgctgtgcatgaggattcaggagacgaagatggcgaggacccggacaaacgaataagtattcgagcctccgataaacggatcgcctgtgatgaggagttcagcgacagtgaggatgaaggtgagggtggaaggcgcaacgtagccgatcacaaaaagggggctaagaaagcaagaatagaagaggataagaaggagaccgaggataaaaaaacggatgtgaaggaagaggacaaaagcaaggacaattctggcgagaaaaccgacaccaagggtactaagagcgagcagctttccaacccgtaa

SEQ ID NO: 425 - DNA, 1389 bp, synthetic construct
  source 1..1389: mol_type = other DNA
atggacaaggattcccagggtctcctggattcctctctcatggctagcggcacagcatccagatctgaggacgaggagtccctggcagggcaaaaacgggcctccagccaggccctgggaacaatcccaaagagaagaagctcctccagatttatcaaaagaaagaaatttgatgatgaactggtggagtcatccttggcaaaaagcagcacccgggctaagggcgcaagcggagtggagcctggtcgctgttcaggaagcgaaccatctagcagtgagaaaaagaaagtgtctaaggccccttctaccccggtgcctcctagccccgcccctgcacctggtctgacaaagcgggtcaagaaaagtaaacagcccctgcaggtcacaaaagacctgggcaggtggaagcccgcagatgaccttctgctgatcaacgctgttctgcagactaacgacttgaccagcgttcacctgggggtcaaattttcttgccgcttcacccttagggaggtacaagaaagatggtatgcactcctctacgaccccgtgatatctaagctggcatgccaggccatgcggcagctgcaccctgaagcgatagccgccatccagagcaaagcactgttttccaaggctgaggaacagctgctgagcaaggtcgggagcacatcccaacctacccttgagacgtttcaggacctgctgcacagacaccccgacgccttctacctcgctaggaccgcgaaagcgctgcaggcacattggcagttgatgaaacagtactacctcctcgaggaccagacagtgcagcctctgccaaagggcgaccaggtgctgaacttttccgacgcggaagatctgatcgatgattctaagctgaaggatatgcgggatgaagtccttgagcacgaactcatggtggccgacagacgccagaagagagagatccgccagcttgagcaggagctccacaagtggcaggtgctcgtggattccatcacaggcatgagctccccagatttcgacaaccagactttggctgtgcttcgcggacggatggtgaggtacctgatgagaagccgggagatcaccctgggcagggccactaaagacaaccagattgatgtcgatctgtctctggagggccctgcctggaaaatctcaagaaaacaaggtgttattaagcttaagaacaatggcgacttttttatagcaaatgagggacgaagacccatctacatcgatgggagacctgtgctttgtggatcaaagtggcgcctttctaacaactcagtcgtcgagatcgccagcctccgctttgtcttcttgattaatcaggatctgatcgctcttatcagggctgaggctgccaagatcacgccccaataa

SEQ ID NO: 426 - DNA, 1173 bp, synthetic construct
  source 1..1173: mol_type = other DNA
atgggcgagaagctggaactccggcttaagtctcctgtgggagcagagcctgctgtatacccgtggcctctccctgtgtatgacaaacaccatgacgcggcccacgagattatcgagacaatcagatgggtgtgcgaggaaatacctgacttgaaactcgctatggaaaactatgtcttgattgattatgacactaaaagcttcgaatccatgcagcgactgtgtgacaaatacaaccgggctattgacagtattcaccaactgtggaaagggactactcagcctatgaaactgaatactcggcccagcacaggtttgctgaggcatattctccagcaagtgtacaatcattccgtgacagatcctgaaaagctcaataattacgagccattcagtcctgaggtctacggggaaaccagcttcgacctcgtcgcccagatgattgatgaaattaagatgaccgacgacgatttgttcgtcgatctcgggagcggagtgggccaggtggtgctccaagtggcggccgctacaaactgtaaacaccattacggggtcgaaaaggcggacatcccagcaaagtacgcggaaacaatggacagagaattccggaagtggatgaagtggtacggcaagaagcatgccgaatacactcttgaaaggggggatttccttagtgaagaatggagggagaggattgccaatacatcagttatcttcgtgaacaatttcgcattcggaccagaggtcgaccatcagctgaaagaacggtttgcaaacatgaaggaaggaggaagaattgtctctagcaagcctttcgcaccactgaactttaggatcaattcacggaatctgagcgatatcgggaccatcatgcgagtagttgagctcagcccactgaaaggctcagttagttggactggtaaaccagtctcctattacctccacactattgataggactatcctggagaattatttctcctctctgaagaaccctaagctgcgcgaagaacaagaggccgcacgacgcaggcagcaaagggagtcaaaatcaaacgctgccacgccaaccaaaggccccgaggggaaggtcgcgggaccggccgatgcccccatggatagcggagccgaagaggagaaagccggagcagcaactgtgaaaaaaccaagttaa

SEQ ID NO: 427 - DNA, 1164 bp, synthetic construct
  source 1..1164: mol_type = other DNA
atgagccctgaaaagtcacaagaggagtcacccgaggaggacacggagcgaacggagagaaaacccatggtgaaggacgcctttaaagatattagcatttattttacaaaagaagagtgggccgaaatgggcgactgggagaaaacgagataccgcaatgtgaagaggaactataatgcgctcattaccattggcctgagggctactcggccagcattcatgtgccaccggcggcaagctatcaaactgcaggttgatgataccgaagacagcgacgaagagtggactcctcggcaacaggtgaagccaccgtggatggcacttcgggtagaacagagaaaacatcaaaaaggcatgcccaaggcctccttcagcaacgagtcttcactgaaggagttgagtcgaaccgctaacctgctcaatgcaagcggcagtgagcaggcccagaagccagtgagtccttccggtgaggcttccacctccggtcaacatagccggctcaaacttgagctgagaaagaaggagacggaacggaagatgtatagcctcagagaacggaaagggcatgcgtataaagaggtgtctgagccccaagacgatgactacctgtactgtgaaatgtgccagaatttctttatcgattcatgtgctgcccatggaccacccacctttgtcaaagactccgcagtggacaagggccaccccaaccgctcagctcttagcttgccacccggtctcagaatcggtcctagcggcattccacaagcaggcctcggggtgtggaacgaagctagtgatctgcctctgggcctgcattttggaccctatgagggccgaattacagaggatgaggaggccgcaaacaatggctatagttggctgattaccaagggacgcaactgctatgagtatgtggatggaaaagataaaagctgggctaactggatgcggtatgttaactgtgccagagacgacgaagagcagaacttggtggccttccagtaccaccggcagatcttctatagaacatgcagagtgatccgccctggctgcgaattgctcgtatggtacggcgacgagtacggacaggagctcggcattaagtggggctcaaaatggaaaaaagaactgatggccggtagggaacctaaaccggaaatttaa

SEQ ID NO: 428 - DNA, 660 bp, synthetic construct
  source 1..660: mol_type = other DNA
aagatgaacaaaagccgacagagagtaagatacgactccagcaaccaggtcaagggaaaacccgacctcaacactgctttgccagtgcggcagacggcatccatctttaaacagcccgttactaaaatcacaaaccacccaagtaataaggtcaaatccgatccccagaaagctgttgatcagcctaggcagctcttctgggagaaaaagttgagcggtctgaacgcgtttgatattgctgaggaactggtgaaaaccatggacttgcccaagggactgcagggagtaggcccaggttgcacggacgagaccctcctctctgccattgcgtcagccctccatacctccaccatgcccatcacaggccagctttcagcagctgtagagaaaaatcccggagtctggcttaacacaacacagcccctttgtaaggcctttatggtgaccgacgaagatatccggaaacaggaagagctcgtgcagcaggttcgcaagcggcttgaagaggccctcatggcagatatgctggctcacgttgaagagctcgcacgcgatggagaggcaccacttgacaaagcctgcgccgaagatgatgatgaggaggacgaagaagaggaagaagaggaacctgacccggatccagagatggagcatgtttaa

SEQ ID NO: 429 - DNA, 471 bp, synthetic construct
  source 1..471: mol_type = other DNA
atgggggaaaaaaatggggatgccaagaccttctggatggagttggaggatgacggaaaagtggacttcatttttgaacaagttcagaatgtgttgcagtctctgaagcaaaagatcaaggacgggtcagcaaccaataaggaatacattcaggcaatgatactggtgaacgaagctactattattaatagctcaacctctatcaagggtgcctcacagaaggaagttaatgcccagtcatcagacccaatgccggtgacacagaaggaacaggaaaataagtctaacgcttttcctagcacaagttgcgagaactcttttcccgaggactgtaccttcctcaccaccgagaataaggaaatcctttcacttgaagacaaggtagtggacttcagggaaaaggattcctcctctaatctttcctaccagagtcacgattgttctggcgcctgcctgatgaagatgccctaa

SEQ ID NO: 430 - DNA, 1473 bp, synthetic construct
  source 1..1473: mol_type = other DNA
ctggcgagaaactatcccaagcagaaagaggtggttagcgacgttgatatatcaaatggggtggagtcagtgccaatttcattttgcaatgaaattgatagccggaaactgcctcaatttaaatatagaaagacagtatggcccagagcatacaatctgaccaatttttcctcaatgtttactgattcatgtgactgctcagagggatgcattgacatcacgaaatgtgcctgcctgcagttgacagcccggaatgccaagacctcaccactcagctctgataagatcaccacaggatataagtacaagcggctgcagcggcaaatccccacaggcatttacgagtgtagcttgctgtgtaaatgcaacagacaattgtgtcaaaacagagtagtccaacacggtccgcaagtgcgactgcaggtgttcaaaacggagcagaagggctggggcgtgcggtgcttggacgatatcgatcgcggcactttcgtctgtatttattccggacgcctcctgtcccgcgccaacactgaaaaaagttatggtatcgacgagaacggaagagacgagaatactatgaagaacatcttctccaagaagagaaagcttgaggttgcgtgtagtgactgtgaggtggaagtcctgccgctcggcctcgagactcatccccgcaccgcaaagacagagaaatgtccaccgaaattctcaaataaccccaaggagttgactgttgagacaaaatatgacaatatcagtaggatacagtaccattcagtgattcgggatccagagagcaagacagccattttccagcacaatgggaaaaaaatggagttcgtatccagcgaatcagtgactcctgaggacaatgacggatttaagccacctcgcgaacacctcaattctaagaccaagggcgcacaaaaagattcaagctctaatcacgtggatgaattcgaagacaacctgttgatcgagtccgatgttatagatatcaccaagtaccgggaggagacaccccctcgaagcaggtgcaaccaggcaaccacactcgataatcaaaatataaaaaaggccattgaggtgcagatccagaaacctcaggagggaagatctaccgcctgccagaggcagcaggtgttctgcgacgaagagctgctgagtgagacaaaaaatacctctagtgactctcttaccaaatttaacaagggcaatgtgttcctgctggatgcaacaaaagagggcaacgtcggtcgattcctgaaccactcatgttgtcccaatcttctcgtgcaaaatgtgttcgttgaaactcacaaccgcaactttcccctggtggcctttttcacgaacaggtatgtcaaggctagaacggagctgacatgggattacggctacgaggccgggactgtccccgaaaaagagattttttgtcagtgcggcgtaaataagtgccgcaagaagatcctttaa

SEQ ID NO: 431 - DNA, 1371 bp, synthetic construct
  source 1..1371: mol_type = other DNA
atgaagatagaggaagttaagtctactacaaaaactcagagaatcgcttctcatagtcacgtgaagggtctgggactcgacgaatcaggattggccaagcaggccgcgagcggtctggtgggccaggagaacgcacgagaagcgtgcggggtgattgtggaactgataaagtctaaaaagatggcaggccgggccgtgttgctggcaggcccacccggaaccggcaaaactgccctggctctggcaatcgctcaggagctggggtcaaaagtgccattctgccccatggtaggatctgaagtctattctacggagatcaagaaaacagaggtgctcatggaaaattttaggcgcgcgatcgggctgaggattaaggaaacaaaagaggtatacgaaggagaggtgaccgagctcactccttgcgaaacagaaaacccgatgggcggatatggtaagaccatttcacacgtgatcatcggactcaaaactgccaaggggaccaagcagcttaaactcgacccctccatctttgagagtctccagaaggagagagtggaagccggagatgtgatttacattgaagccaatagcggggctgtgaagagacaaggaaggtgtgatacctacgctaccgagttcgacctggaggccgaggagtacgtcccattgcccaaaggggacgtccacaagaaaaaagagatcatccaggacgtgaccctgcatgatctggatgtggctaatgcccgcccacaggggggacaagacatcctgtcaatgatggggcagcttatgaagcccaaaaaaacggagattaccgataagcttcggggtgaaatcaacaaggtggttaataaatacatcgaccaggggatagcggagctggtgcctggtgtactgttcgttgacgaagttcatatgctggacatcgaatgtttcacatatcttcaccgggcactcgagtcctccattgccccaattgtgatcttcgccagcaatcgcggcaactgtgtcataaggggcaccgaggacattacaagtccccacggtataccattggacctgctcgaccgggtgatgattatcaggactatgttgtatacacctcaggaaatgaaacagatcataaagatcagggcacagactgaaggcattaacatttccgaggaggctctgaaccatttgggcgaaatcgggacaaagactacactcaggtactccgtgcaactgctgacaccggcaaatttgctggccaagatcaatggcaaagatagcattgagaaggagcacgtcgaagagatttccgagctgttttatgacgccaagagcagtgctaagattctcgccgatcagcaggataagtacatgaaataa

SEQ ID NO: 432 - DNA, 2562 bp, synthetic construct
  source 1..2562: mol_type = other DNA
cacggatccagcctgatgaagaaaagacgcaattggcatcggcatgattacactgaaattgatgatggctccaaaccggtgcaggcaggaacccggacatttatcaaggaactgcggtcaagagtttttccctccgccgatgagatcatcataaagatgcatgggtcacaactcactcagaggtatctcgagaagcacggcttcgatgtgcctatcatggtccccaaattggacgatctgggactgaggttgcccagccctaccttctctgtgatggacgtcgaacggtacgtcggaggcgacaaggtgatcgacgtgattgacgtggctcgccaggctgacagcaagatgacgcttcacaactacgtcaagtactttatgaatccaaaccgacccaaagtactcaacgtcatctccttggaattttccgacaccaaaatgtctgaactggtagaggtacctgatatcgcgaagaaactgtcatgggtggaaaactattggcccgacgattctgtattcccaaagccattcgtgcagaaatattgtctgatgggtgtccaggacagctacaccgactttcacatcgattttggtggaacaagcgtgtggtaccatgtcttgtggggtgaaaaaatcttctatctgatcaagccaactgatgagaaccttgctagatacgagtcatggagtagctccgtgactcagtctgaggtgttctttggcgacaaagtggacaagtgctacaagtgtgtggttaaacaaggccataccctgttcgtgccgacgggctggattcatgctgttctgacaagccaagattgcatggcctttggaggcaacttcctgcataatctcaacatcggcatgcagctccgatgttatgagatggagaaaaggttgaagacacccgacctctttaagttccctttcttcgaagccatctgctggttcgtcgctaagaacctgttggagacgctgaaagaactgagggaggacggattccagccccagacttatctggtgcagggcgttaaagcccttcacacggctctgaaattgtggatgaaaaaggagctcgtgtccgaacatgctttcgagatcccagacaatgttaggcccgggcatctgataaaagagctctccaaggtgatccgggccatcgaagaagagaatgggaaacccgtgaagtcccagggtattcctatagtttgtcccgtaagcagatcttccaacgaagctacaagcccctatcacagcaggcgcaaaatgagaaagctccgagaccataacgtgcgcacccctagcaacctggatatcctggaactgcacaccagagaagtgttgaagaggctggagatgtgcccctgggaagaagacatcctttcaagcaaactcaatgggaagtttaacaagcatcttcagcccagctccacggtccccgagtggcgagccaaagacaatgatctgcgcctgctcctcacaaacgggaggataattaaggatgaacggcagccatttgccgatcaatcactgtacacagccgacagcgagaatgaagaagacaagcgacgcacaaagaaagccaagatgaagatcgaagagtcctccggggtcgagggagttgaacacgaggagagccagaaaccactgaacgggtttttcacccgggtgaaaagtgaactgcgatccagatccagtggctatagcgatatttcagaatctgaggacagtgggcccgaatgcaccgcgcttaaatccatttttacaacagaagagtctgaatctagcggggatgagaagaagcaagagatcactagtaacttcaaggaggagtccaacgtgatgaggaattttctgcagaaaagccagaagccatcacgctcagaaatacctataaagagagagtgccctactagtacctctacagaggaagaggccatccagggtatgctctcaatggctggactgcattattcaacatgtctgcaaaggcaaattcagtctaccgactgttccggagagagaaacagtcttcaggaccccagttcatgccatggcagtaatcacgaggtgcggcagctgtaccggtacgacaagcctgtagaatgcggataccacgtgaaaacggaggatccagacctgaggacctcttcatggattaagcagtttgatacttcccggttccacccacaggatttgagccgatctcagaaatgtattcggaaggaaggcagtagcgaaatatcccagcgggtgcagagccgaaactatgtggactcttctggctctagcttgcagaatggaaagtacatgcagaatagcaacttgaccagcggggcatgccagatcagcaacggaagtctttctcccgaaagaccagtgggcgaaaccagctttagcgtgcccttgcatcctacgaagaggcctgcaagcaatccaccacccatttcaaatcaggccactaagggcaagcgacccaaaaagggcatggcaacagccaagcaacgcctgggaaaaatcctgaagttgaacaggaacgggcacgccaggttttttgtgtaa

SEQ ID NO: 433 - DNA, 237 bp, synthetic construct
  source 1..237: mol_type = other DNA
atggagcccggctgcgacgaattcctcccaccccctgagtgccctgtgttcgagccatcctgggccgaattccaggatccgctcggatatatcgctaagatccgacctatcgccgaaaagtctggcatatgtaaaataagaccccctgcagattggcagcctccattcgcggtggaggtggacaacttccggtttacgccccgcgtccagagactgaacgagctggaggcacagtaa

SEQ ID NO: 434 - DNA, 441 bp, synthetic construct
  source 1..441: mol_type = other DNA
ggtgctaatcacgtgcagtgtaacacgcacccatttgacaacgaggtcaaagataaggagtataaaccccatagtatcccattgcggcagtccgttcaaccctccaaattttcaagttatagcagacgcgcaaagagacttcagcctgacccagagcctacggaggaagatatagagaaacacccggaactgaagaagctgcaaatatatggaccagggcctaagatgatgggtttggggctgatggccaaagacaaagacaagaccgtgcataagaaggtcacctgcccccccacagttactgtgaaagatgagcaaagcggcgggggcaatgtttcctcaactctcctcaaacaacatttgtctttggagccatgtaccaagaccacgatgcagctcagaaagaaccatagcagcgcgcagtttatagattcatactaa

SEQ ID NO: 435 - DNA, 1005 bp, synthetic construct
  source 1..1005: mol_type = other DNA
ctcgccgagtgtaagcagcctcctgaggctttcggattcgagcaggctacgcaggagtacagcctgcagagctttggagagatggctgacagttttaagtctgactacttcaatatgcctgtgcatatggtccccaccgaattggtcgagaaggaattttggagactggtttccagtatcgaagaagacgtaaccgtggagtacggtgccgacatacactctaaggagtttggttcagggttccctgtctccaattccaaacagaacctttccccggaagaaaaagaatacgccacctccgggtggaacctgaatgtgatgccggtcttggatcagagcgtgttgtgccacatcaacgctgatatttctgggatgaaggtgccatggctctacgttggcatggtttttagcgccttttgttggcatatcgaggaccactggtcttacagcatcaattacctgcactggggtgagccaaaaacatggtatggggtacccagccttgctgcagagcacctcgaagaagtgatgaagatgttgactccagaactctttgactctcagcctgacctcttgcatcagctggtcacactgatgaatcccaatacactgatgagccacggtgtaccagtggttagaaccaatcagtgtgcgggtgaattcgtgattacatttccgcgcgcttaccatagcgggtttaatcaggggtacaatttcgcggaggctgtgaatttttgcaccgcagactggctgccagcggggaggcagtgcatagaacattacagaaggttgagacgatattgtgtgtttagccatgaagagctgatctgtaaaatggccgcttttcccgagacactcgacctgaatctggccgttgccgtccacaaagagatgtttattatggtgcaggaggagaggagacttcgcaaggcactgcttgaaaaaggagtcaccgaggcagagagagaggccttcgaactcctgccagacgacgaacgccaataa

SEQ ID NO: 436 - DNA, 1275 bp, synthetic construct
  source 1..1275: mol_type = other DNA
ctgcacaagctcaagattagagctgagtctttcgacacgtgggcgaacaaggttagggtggctcttgaggtagaagacggtcgcaaacggtccttcgaagaactcagagcactggagtctgaagccagggaacgcagatttccaaattctgaattgcttcagcgacttaaaaattgtctttcagaggtagaagcttgcattgcccaggtgctgggtcttgtctcaggccaggtggctaggatggatacgccacaactgacccttacggagctgagggtactgctggaacagatgggctccctcccctgcgccatgcatcaaatcggggatgtaaaagatgttctggaacaggtcgaagcataccaggcggaggcacgcgaggcccttgccaccctgcccagtagccccggcctgctccgctcactgctcgagcgaggacagcagctcggagtcgaggtacccgaagcccaccagctgcaacagcaagtggagcaggcccaatggctggacgaggtgaaacaagctctggcaccctccgcgcatcgcggaagcctggttattatgcaggggctcttggtgatgggcgcaaagatcgctagttctcctagcgttgataaagcacgcgcagagcttcaggagctgctgaccatcgccgaacggtgggaagagaaagcgcacttctgcctggaggctcggcagaagcacccgcccgccacactcgaagcaattatccgagagacagaaaacatccccgtgcacctgccaaatatacaggccctgaaagaggctctgaccaaagctcaggcatggatagctgatgtggatgagatccaaaacggtgaccactatccttgtctggacgacctcgaaggcctcgtagccgtggggagagatctgcccgtcggcttggaagagctgagacagttggaactgcaggtgctgactgcacactcttggcgcgaaaaggccagcaagacttttttgaagaagaactcctgctacactctgcttgaagtcctgtgcccctgtgcggacgcagggagcgacagtacgaagaggtcccgctggatggagaaggccctgggactttatcagtgcgatacagagctcctgggtctctccgctcaagacctgcgcgatcccggatctgtgatcgttgcgttcaaggagggcgaacagaaagaaaaagagggaatccttcaactccgcaggacaaattccgccaagccatcacctcttgcgccttctctgatggcctcaagtcccaccagctaa

SEQ ID NO: 437 - DNA, 915 bp, synthetic construct
  source 1..915: mol_type = other DNA
aggagccggagacctcgacttgagacaattctggctctgctggtcgctttgcagaggctgccagtaaggctgccggagggcgaggccctgcagtgcttgactgagagagccatcgggtggcaggatagagctcggaaagccctggcaagcgaggatgtgaccgccctgctgcggcagctcgccgaactgagacagcaactgcaggccaagccccggcccgaagaagctagcgtctacaccagcgcaaccgcatgtgatccaattagggaaggctccggtaacaacatatcaaaggtccagggcttgttggagaatggggactccgtaacaagcccagaaaacatggccccaggtaaggggtcagatctggaactgctgagcagcctgctgcctcagctcaccggtcctgtcctggagctgcccgaggccatccgcgctccgctggaggagctgatgatggagggcgaccttctggaggttaccctcgacgagaaccactcaatctggcaactgcttcaggccggtcagcctcctgacctggacagaatacggacccttctcgaattggagaagttcgagcaccagggaagtcggacaaggtcccgggctctggaacggagacgcagaagacagaaagtagatcaaggccgcaatgtcgaaaacctggtccagcaggagctgcagtccaaacgggccagatcctctggcatcatgtcacaggtgggcagagaagaagaacactatcaggagaaagcagacagggagaatatgttcctgactccctctactgatcattctccattcctgaagggaaaccagaattctcttcaacataaggactctggctctagcgcagcctgcccaagtctcatgccactcctgcagctgtcttattccgacgagcagcagctctaa

SEQ ID NO: 438 - DNA, 618 bp, synthetic construct
  source 1..618: mol_type = other DNA
atggtaaaacttgccaatcccctctacaccgagtggatcctggaggctatcaaaaaggtcaagaagcagaagcaacggccaagtgaggaacggatttgtaacgcggttagcagcagccacggcctggatagaaaaaccgtgctggagcaacttgagctgtctgtgaaggatggtaccatcttgaaggtgagtaataaggggctcaactcatataaggatccagacaacccagggcgcatcgcgctgcctaagccaaggaatcatgggaaacttgataacaaacagaacgtcgactggaacaagctgatcaaacgggccgtcgagggcctcgccgagtctggcggaagcaccctgaagtccatagagcggttcctgaagggccagaaagacgtctccgctctcttcggagggtcagccgcatcaggattccaccaacagttgcggctcgcaatcaaaagagccatcgggcatgggcgactgctgaaagatgggcctctgtatcggctcaatactaaggccactaatgtggatgggaaagagtcctgcgagagcctctcttgcttgccacctgtgtccttgctgcctcatgagaaagacaaaccggtggctgaaccctaa

SEQ ID NO: 439 - DNA, 1494 bp, synthetic construct
  source 1..1494: mol_type = other DNA
aagaagggaagaaaattgctccagaagaaggctgcacagattaaaaggaggtacacaaatcctataggccggcctaaaaatagattgaagaagcagaacaccgtctctaaggggccgttcagcaaggtgagaaccggtcctggtaggggaagaaagcggaaaattactctcagctcacagtctgctagttccagttctgaggagggttatcttgaacgaattgatggtttggacttctgccgggactcaaacgtgtcactcaagttcaacaagaaaaccaaggggcttatcgacggccttaccaagttcttcaccccaagtcccgatgggcggaaagcccggggcgaagtcgtcgactattctgagcagtaccggatcagaaagagaggaaatcggaagtccagcacttccgactggcccacagataaccaagacggttgggacggcaaacaggaaaacgaagagcggctttttggatctcaggagatcatgaccgagaaagacatggagctgttcagagacattcaggaacaggcacttcaaaaagtgggcgtgaccggcccccccgacccccaggttagatgtccaagcgtgattgaattcgggaaatacgagatccacacatggtactcctccccttacccccaggagtacagcagactgcccaagctttacctttgcgagttctgcctgaaatatatgaagagccgcacaattctgcagcagcacatgaagaagtgcggatggtttcaccctccagctaacgagatataccgaaagaataatatttctgtctttgaagtggacgggaacgtgagcacaatctactgtcagaatctttgtctgctggcgaaactctttctggatcataagactctttactacgatgtagagcccttcctcttctacgtgcttactcaaaacgatgttaagggctgccatctcgtcggttatttttccaaagaaaagcattgccagcagaagtacaatgttagctgcataatgattctcccacagtatcagcggaagggttatgggagatttctgattgatttttcttatctgttgtccaaaagggagggtcaggctggatctccagagaagccactcagcgatctcggtcggctctcttatatggcgtactggaaaagtgtgattctggaatgcctgtaccatcagaacgataaacaaatctccatcaagaaactgagtaagctgaccgggatttgcccacaggatattacctctacattgcatcatctgcggatgctcgacttcagatccgatcagtttgtgatcatcagaagggaaaagctcatccaggatcatatggctaaattgcagctgaacctgcggcccgtcgacgtggatccagagtgcttgagatggacgcctgtgattgtgtcaaattccgtagtgtctgaggaagaagaagaagaggcagaggagggagagaatgaggaaccacagtgtcaggaacgggaacttgagtaa

SEQ ID NO: 440 - DNA, 1467 bp, synthetic construct
  source 1..1467: mol_type = other DNA
ggaagcctgagtgccccgtctatgcagaacatggagacatctcccatgatggatgtcccatccgtgtccgatcactctcaacaagtggtggatagcgggttttctgacttgggaagcattgagtccacgactgagaactatgagaacccttctagctacgactcaactatgggggggagcatctgcggcaactcttcaagtcagtcatcttgctcctacgggggcctgtcatcaagcagcagtctgacacagtcaagctgcgttgtgacccagcagatggcatcaatgggtagctcatgttccatgatgcagcaatcttccgtccagcccgccgccaattgtagcatcaaatctccccaaagttgtgtggtagagcggccgccctccaatcagcaacaacagccccctcctccacccccccagcagcctcaaccaccacctccccagccacagcccgccccccagccaccccctccccagcagcagccgcagcaacagcctcaaccacagcctcagcagcccccaccaccccctcctcctcagcagcagccaccgctgtcccagtgttcaatgaacaatagcttcacccccgcgcccatgattatggaaatcccggagagtggaagtaccggaaacatcagtatttatgaaaggattcctggcgatttcggtgccggctcctatagtcaacctagtgccacatttagcttggcaaagctgcagcagctcacaaatacaattatggatccgcatgccatgccctactcccactcccccgccgtgacctcatatgcgacaagcgtgagccttagtaatactgggctggcccaactcgccccctctcatccactcgccggaaccccccaagcccaggccacgatgactcctcctcctaacttggctagcaccactatgaatctcacaagccctctgttgcagtgtaatatgtctgccaccaatattggcattccacacacccagcggctccagggccaaatgccagttaaagggcatatttctatacggtccaaatcagcacctctcccttcagcggctgcccatcagcagcaactgtatggcaggagtccaagtgcagtagccatgcaggctgggccaagagccttggccgtccagagagggatgaatatgggtgtaaatctgatgccaaccccagcctataacgtgaatagtatgaacatgaataccctcaacgcaatgaattcttatagaatgacacagcctatgatgaatagttcatatcatagcaatcccgcatacatgaaccagacagctcagtatcccatgcagatgcagatgggcatgatgggatcacaggcctacactcagcagccaatgcagcctaaccctcatggtaatatgatgtatactgggccgtcccaccactcttacatgaacgctgccggtgtgcctaagcaatcattgaacggtccatacatgaggagataa

SEQ ID NO: 441 - DNA, 2016 bp, synthetic construct
  source 1..2016: mol_type = other DNA
atgagtgggcttggggagaatcttgaccctctggcgagcgacagtagaaaacgcaagctgccttgcgacactccgggtcagggacttacctgtagtggtgagaagaggagaagagaacaggagagcaagtacatcgaggaactggccgagttgatctccgctaatctgtccgatatcgacaactttaacgtgaagccagataaatgtgcgatcctcaaagagaccgtgaggcagatcaggcagatcaaggaacagggcaaaaccatcagcaatgatgatgatgtgcaaaaggcagatgtctccagcaccggccaaggtgtgatagacaaagatagccttggccccctgctgctccaagccctggatgggtttcttttcgtggttaatcgcgatggaaacatcgtcttcgtcagcgagaacgttactcagtatctgcaatataaacaggaagatttggtcaacactagtgtgtacaacatcctgcacgaagaggataggaaggatttcttgaagaacttgccaaaatccacggttaatggtgttagctggacgaacgagacccagcggcaaaagtctcatacctttaactgtcgcatgctgatgaagaccccgcacgacatcctcgaggatatcaatgcttcccctgaaatgcggcagagatacgaaactatgcagtgctttgcactgagccagccccgcgccatgatggaagagggtgaagacttgcaatcttgtatgatttgtgttgcacgcagaattaccaccggcgaacggacattcccctctaacccagagtcattcattactagacacgatttgtcaggcaaggtcgtaaatattgatacgaacagcctgagaagctctatgaggcccggcttcgaagatatcataagacgatgtattcagcggttctttagcctcaatgatggccagagttggtctcagaagcgccactatcaggaagcttaccttaatggccacgctgaaacacccgtgtataggttttcactggccgatggcacaattgtgaccgcccagaccaagagtaagttgtttagaaatcctgtgactaacgaccggcacggcttcgtttcaacacactttctgcagcgagagcaaaatggataccggcctaaccctaatcccgtggggcaaggcattcgaccgcccatggctggctgcaacagcagcgtcggcggcatgtccatgtctccgaaccagggactgcaaatgccttccagtagagcctacgggcttgccgacccctcaacaacgggacagatgagtggcgcaagatatgggggatcaagcaacatcgcaagcctgactccaggaccgggaatgcaaagcccatctagctatcagaataataattacggtctgaatatgtcttcacctccacacgggtccccaggcctggcacctaatcagcagaatattatgatctcacctagaaaccggggcagccctaagatcgcaagccatcagttttcccccgtagctggcgtgcacagtcctatggcttcatccgggaataccgggaatcactccttctccagctctagcctgagcgccctgcaagcgatctccgaaggagtggggactagccttcttagtacgctgagttccccaggtcccaaactggacaatagccctaacatgaatattacccaaccctctaaagtttcaaaccaagactccaagtctcctctcggtttctattgtgaccagaaccctgttgagtcctccatgtgccagtccaattcaagggaccacttgtctgataaggagtctaaggagtctagtgtcgagggggcagaaaaccaaagaggaccactggagtctaagggtcacaagaagctgctgcaactgcttacttgctcatctgacgatagaggccactcttccctcacaaacagtcctttggactccagttgtaaggagtcaagcgtgagcgtcacttctccatcaggtgtgagctccagcactagcgggggcgtgagtagcactagctaa

SEQ ID NO: 442 - DNA, 1209 bp, synthetic construct
  source 1..1209: mol_type = other DNA
ggaacccagaatcgaccgctgcttcggaactctcttgacgacctcgttgggccaccaagtaacctcgagggacagagcgacgaacgggcactgctggatcagctgcatacacttctttccaacaccgacgccacaggattggaagagatagaccgagccttgggaatccccgagctggtcaatcagggtcaggcattggagcccaagcaggacgctttccaaggccaggaggctgctgtaatgatggaccagaaggcaggcctttatggccagacatacccagctcagggaccaccaatgcaggggggctttcacctgcagggacagtcaccatcttttaattccatgatgaaccagatgaatcagcagggcaacttccctctgcaagggatgcaccccagagcaaacattatgcgcccacggaccaacacacctaagcaactgagaatgcagctgcagcagcggctgcaaggacagcagtttctcaaccagagcaggcaggcactggagctcaaaatggaaaaccccactgcagggggtgcggccgtaatgagaccgatgatgcagccccaggtgtcaagtcagcaagggttcctcaacgcccagatggtggcccagcgcagcagagagctgctgtctcatcattttagacagcagagggtggccatgatgatgcagcagcagcagcaacaacagcaacagcagcaacaacaacagcaacaacagcagcagcaacagcaacaacaacaacagcagcagcagacccaggcattctctccacctcccaacgtgaccgccagtccgtccatggacggccttctggccggccccacaatgcctcaggcacctcctcaacaattcccttaccaaccaaattacggaatgggccagcagcctgaccccgcatttggccgcgtctcctcacctcctaatgcgatgatgtctagccggatgggccccagtcaaaacccaatgatgcagcacccccaggcagccagcatttatcagtcatcagagatgaaggggtggccaagcggaaaccttgcccggaattctagcttctctcagcagcagttcgcccatcagggcaatcctgccgtttacagcatggtgcacatgaacgggtcttctggccatatgggacagatgaatatgaatcctatgcccatgagcggtatgcctatgggtcctgaccaaaagtactgctaa

SEQ ID NO: 443 - DNA, 1452 bp, synthetic construct
  source 1..1452: mol_type = other DNA
atggccgctgacgaggtagccgggggcgcccggaaagcgactaagtccaagctgttcgaattcctggtacacggcgtaaggcctggcatgccatcaggcgcaaggatgccacaccagggggcgcccatgggaccgcccggctcaccctacatgggaagcccggctgtaaggccagggcttgcacccgccggaatggagcccgcgagaaagagggccgcaccaccgccaggtcagtctcaggcccaaagccaaggccaacctgttccaaccgccccagcccgctcacgcagcgctaagcggcggaaaatggcagataaaattttgccccagcggatacgagaattggtgcctgagagccaggcctatatggatctcctcgcctttgaacgaaaactggaccaaaccattatgaggaagagggttgacatccaagaggcgctcaagcgccctatgaagcagaagagaaaacttagactttatatttctaatacgttcaatccagctaagcccgatgcagaagacagcgacgggtctattgcaagctgggaactgagagtcgagggaaagcttctcgatgatccctccaaacagaagagaaaattcagctcattctttaagtcacttgtaatagagctcgacaaggacctgtatgggccagataaccacctggttgaatggcacaggacccccacaacccaggagactgatgggtttcaggttaagagacctggagacttgtccgtccggtgtacactcctcctgatgctcgactaccaaccacctcaatttaaactcgatcccaggcttgcgaggcttctgggcttgcatacccagtcaaggagcgcaatagtgcaggccctgtggcagtacgttaaaaccaaccgactgcaagacagccatgacaaagaatacataaacggtgacaaatacttccagcagatttttgactgccctaggctcaaattctctgaaatccctcaacgcctgaccgctttgttgctgccacctgatcctatagtcattaatcacgtcatttccgtggacccatccgaccaaaagaagacagcttgttatgatattgatgtcgaggtggaggaacctttgaagggccaaatgagctccttcttgttgtctactgccaatcagcaagagatcagcgcgctggacagtaaaattcatgaaaccatcgagagcattaatcagttgaaaatccaaagagatttcatgctgtccttttccagagaccccaaggggtacgtccaggacctcctgagatcacaaagccgcgatttgaaagtcatgacggatgtcgccgggaatccagaggaggagagacgggcggagttttaccaccaaccgtggagccaggaagccgtgagcagatatttctattgtaagatccagcagagacgacaagagttggaacaaagcctcgtggtgagaaacacataa

SEQ ID NO: 444 - DNA, 3084 bp, synthetic construct
  source 1..3084: mol_type = other DNA
atgtatgagggaaaacacatccatttcagcgaggtggacaacaagccactctgcagctactctccgaagttgtgtaaacagcggaggctcaacggctacgccttttgtatacggcacgtgctcgaggataagacggcccccttcaagcaatgtgagtacgtcgccaagtataactcccaacgctgcacgaacccgattcctaaatcagaagatcggcggtattgcaattcacacctccaggttctgggatttattcctaaaaaagaaagaaaaaaaaagaatgatcctatcgacgaagtgaaagttcggcatcaaatggatactatggctttttcattgactgtgccaacattggccctgaagatgccaaacgggctggacggtatgtccctgagtccacctggcgcccgggtgccacttcattacctggagaccgagctggaagacccttttgcctttaacgaggaggacgatgatctgaagaaaggagcaaccgttcgcaagaaactccaatctaaattggcgcaaaaccgccagcgccaaagagagacagagatccttaaagtgcggcaagagcacttcagtcctcctcctgcaccctcccagcagcaacctccacagcagcactcacacctgtccccgctgtcaacatccctgaagcctcccgccccacctcaggggagcgtctgcaagagcccacagcctcaaaacacgagcttgcccatgcagggtgtggccccaacaacacacacaatagcccaagcgcgacagttgagccacaaaagaccactgcccctgctgcctagttcaagagcccccacagtcgatccccccagaaccgacagaatcttgatgaaagctactgccttttccccacattttagttgcataagccgccttcaacgcctcgtaaagctttgtacccagaaacatcagcttgacacagacctttttcctcatctgggcctggattggtctgaagaaagtggcgaagaaccagaagactccgagcaggcatctccgtaccaagttgcgtggtccatccgcgaaacgctcagatatcaacgacacgcttcagacgacgatgacgctgagtctagatcctctcgagtcacacaactgtgcacatactttcagcagaagtataagcatctgtgtcggttggagagagctgagagcaggcagaaaaagtgtcgccacacattccggaaagctctgctgcaggccgcaagcaaagagccggagtgcactggccagttgatccaggaactgcggagggctgcatgcagccggacaagcatctcccgaaccaagctcagagaagtggaaccagcggcttgttctggaacagtcaaaggcgagcagtgtgcaaacaaggctcttccatttaccagacactgctttcagcatatactgctgaaccactcccagcagctcttcagcagttgtacagccaagttcgcagacggacagcagtgtagcgtgccggtgtttgacatcacccatcaaacccctttgtgtgaagaacatgcaaaaaaaatggataacttccttcgaggagacaattcacgcaaagtgcagcaccagcagcagaggaaacctagaaaaaagacaaagcccccagccctgaccaagaagcataagaagaagagaaggaggggtccccgacgacctcagaaaccgattcctcccgccgtgccgcaaggcaacctctctatgccagctagcgtctctctgcccgtggaagcctcacacatcaggagccccagtacacccgaactcagtgccgacgagctgcctgacgatattgcaaacgaaatcacagacattccgcatgatctggaactgaaccaggaagatttttccgacgtgctgcccaggctgcctgacgatctgcaggacttcgacttctttgagggaaagaatggcgatcttctgcctacgaccgaagaagctgaggaactcgagagggccctgcaggcagttaccagtctggagtgtctctctacaattggagtattggcccagagcgacggagttccagtccaggaattgtcagataggggcatcggagtgttttccactgggaccggcgcctcagggatccagtccctgtctagagaggtcaatacagatctgggagagcttcttaacggacgcattgtccacgataacttttcctcacttgaacttgacgagaatctgctcaggtccgctactttgtctaaccctcctacaccgctcgcgggccagatccaggggcagttttcagcccctgcgaacgtgggcttgacaagcgccaccctgataagccaatctgctctgggagaaagggcgtttcccggccaattccatggcctgcatgatgggtcccacgccagccaacgccctcaccccgctcagctcctctccaaggccgacgacttgattacttccaggcagcagtactcaagcgatcattctcattccagcccacacgggtcccattatgacagcgaacatgtcccgtcaccatactccgaccatatcacttccccacatacgacatcatattcaggagacaacatggccgccacattctcagccgagatgccaattatggcacagcacctcctgccgactcagttggaagtgccattggggggagtggtcaatccgcgcacgcactgggggaacctccccgtgaacctcggagatccgagccctttttccaacctgttgggcgcggacggccatttgcttagtaccagtctttcaactcccccaactacctccaatagcgagacaacacagccagcctttgccacggtaacacccagcagctcttccgtgctccccggcctcccacagacttcatttagtggtatgggccccagcgcagagttgatggcgtctacctctccaaagcagcagctgccccagtttagtgccgcttttggtcatcagctgtcctctcacagcggcatcccaaaagatcttcagccaagtcatagtagcatcgccccccccacaggtttcaccgtgacaggcgctactgctacaagcacaaacaatgcatcaagcccatttccttccccgaattaa

SEQ ID NO: 445 - DNA, 1287 bp, synthetic construct
  source 1..1287: mol_type = other DNA
atggagccactgaaagtggaaaagttcgcaaccgccaagaggggtaacggattgcgcgccgtgacccctctgaggcccggcgagttgctgtttcgcagcgatccacttgcatataccgtgtgcaaaggctctcggggcgtcgtttgcgatcgatgtctgctgggcaaggaaaagctcatgaggtgctctcaatgtagagtggccaaatattgctctgcgaaatgtcagaagaaggcttggcccgaccataaaagggaatgtaaatgtttgaaaagttgtaagccaaggtacccgcctgattccgtgcgacttctggggcgcgtggtttttaagctcatggacggcgcaccttccgaaagtgagaagctgtattccttctacgaccttgagtccaacatcaacaagttgactgaggataaaaaggaagggctgcggcagctcgtgatgactttccagcacttcatgcgagaggaaatccaagacgctagtcagcttccccccgccttcgacctcttcgaagcctttgccaaggtgatatgcaactcttttactatatgcaacgccgagatgcaagaggtcggagtgggactgtaccccagcattagtctcttgaaccacagttgtgaccctaactgtagcattgtgttcaacggaccccacctgctgcttcgagcggttagggacatagaagtaggtgaagagctcactatttgttatctcgatatgctgatgactagcgaagaacggaggaaacagctgcgggatcagtattgttttgaatgcgactgctttaggtgccagacccaggataaggatgcggatatgctgaccggtgatgaacaggtctggaaggaggtccaagagtctctgaaaaagatagaggaactgaaggctcactggaagtgggagcaagtgctcgcaatgtgtcaggctatcatcagtagcaattctgaaagactcccagacatcaatatctatcaactgaaggtgttggattgtgcaatggacgcatgtatcaacctcggactgcttgaagaggcacttttttatggtacacgcaccatggaaccgtatcggatcttcttcccagggtctcatcccgtccgcggcgtgcaagtcatgaaggtcgggaagttgcaactgcatcagggcatgttcccccaggccatgaagaacttgagacttgcattcgacattatgagggtgacccacgggagggagcacagtctgatcgaagacctgatcctgttgctggaagagtgcgatgccaatatccgggccagttaa

SEQ ID NO: 446 - DNA, 3123 bp, synthetic construct
  source 1..3123: mol_type = other DNA
catggtaaatctacgcttaaaaagaagcgcacatggcacaaacatggtcctggacaggcgcccgatgttaaacctgtccagaacggctctcaacttttcatcaaagaactgcgatcccggaccttcccatcagctgaagacgtcgtggcccgagtgccaggttctcagctgaccctgggttacatggaggagcacggtttcacagagcctatcctggtccccaaaaaagacgggttggggctcgctgtgccagcgcccactttctacgtgtccgacgtcgaaaactatgttgggccagagcgaagtgttgatgtgaccgatgtgactaagcaaaaggattgcaagatgaaactgaaagagtttgtcgattattattactcaactaacaggaagcgggttcttaatgtgaccaacctggaatttagcgatacccggatgtcctcttttgtggagccacccgatatcgttaaaaagctcagctgggtagaaaattattggcctgacgatgcgctgctggccaaacccaaggtcactaagtactgtctgatatgcgtcaaggactcctacaccgatttccacatcgatagtgggggagcttctgcgtggtaccacgtattgaaaggcgaaaagacgttttatctgatcaggcccgcctctgctaacatcagcctgtatgaaaggtggagaagcgcctctaaccactcagagatgttctttgcagatcaagttgataagtgctataaatgcatcgttaagcagggtcagaccctcttcatccctagtggatggatttatgccactctgactcctgtggactgcctggccttcgccggccactttttgcatagtctgtcagtggaaatgcagatgagggcttacgaggtggaacgacggctcaagctgggtagcctcacacaattccctaactttgagactgcctgttggtatatgggaaaacaccttctggaagcgtttaagggttcccataagagtgggaaacagctgcctccacacctggtacagggggcaaaaatactcaacggcgcttttcggagttggacaaagaaacaggctctggcggaacacgaggacgaactcccagagcattttaaaccatctcaactcataaaggatctggcgaaggagatccggctctcagagaacgcctccaaggcggtcagaccagaggtgaacactgtggcaagcagtgatgaggtatgcgacggcgacagagagaaagaagaaccaccatcccccatcgaagccactccccctcaatcattgttggaaaaagtgtcaaaaaagaagaccccaaagacagtgaaaatgccaaaacccagcaagatccccaagccccctaagcccccaaaacctccaaggcctccaaagaccctcaagctgaaagatggcggaaagaagaagggcaaaaagtcccgggagtctgcttctcctaccattcccaaccttgatttgctcgaggcccacaccaaagaagcacttactaagatggagccccctaagaaaggtaaagcaacgaagtccgtgctgtccgtcccaaataaagacgttgttcacatgcagaacgacgttgagcgcctggaaattcgcgagcagactaaaagtaaaagcgaagccaaatggaaatataagaattcaaaaccagacagtctgctgaaaatggaagaagagcaaaaattggaaaagtctcctctggccgggaacaaagacaacaaattttcctttagtttcagcaacaagaaactgctcgggtctaaagctcttagaccacctacctcacctggggtgttcggcgccctgcagaacttcaaggaggacaagcctaaacctgtgagggacgagtacgagtacgtctccgacgacggggaacttaagatcgatgagttccctatccggaggaagaagaacgcgcccaaacgagacctgagcttcctgctggacaaaaaggccgtgctgcccacccctgtgaccaagcctaagcttgacagtgccgcctataagagcgatgattcctctgacgaagggtctctgcatatagacactgacaccaagcctggtcgcaatgccagggtgaagaaagagagcgggagctctgcagctggtatcctggatctgctgcaggcatccgaagaggttggagcacttgagtacaacccctcatctcagccccctgcttctcccagcactcaagaagctattcaaggtatgctgtccatggccaatctgcaggcgagcgattcttgcttgcagaccacctggggggctgggcaggccaaaggatctagcctcgcggctcacggcgcccgcaagaatggaggaggatccggcaaatccgccggaaagcgccttctgaaacgggctgcgaagaacagcgttgatctggatgattatgaggaagagcaggatcacctggatgcttgctttaaggattccgattacgtttacccttctttggaatccgatgaggataaccctatctttaagagccgctctaaaaaacggaaggggtccgacgatgctccctactcacccaccgctcgggtgggccccagcgtgccaaggcaggacaggcccgttagagaagggaccagagtcgcctcaatcgagacagggttggccgccgctgctgcaaagctcagtcaacaggaagaacaaaagagcaaaaaaaagaagtctgctaaaagaaaactcacacctaacacaaccagtccatctaccagtaccagtatttccgccggaactacaagtacttccacaactcctgcttccactaccccagccagcacaactcctgcgtctaccagcactgcctcttcccaagcatctcaggagggaagctctcccgagccaccacctgaaagtcacagcagcagcctggcagaccacgagtataccgccgctggcaccttcacaggtgcacaggctggtagaacctcccaacctatggctccaggcgtattcctcacgcagagacgccccagtgcgagcagtccgaacaacaatacggctgccaagggaaaacgaaccaaaaagggtatggccaccgcaaaacaaaggcttggcaagatattgaaaatacataggaatggaaaactcctgctgtaa

SEQ ID NO: 447 - DNA, 1101 bp, synthetic construct
  source 1..1101: mol_type = other DNA
atggacagtgatgacgaaatggtcgaggaggcagtcgaggggcatttggatgatgatggactgcctcacggtttctgcacagtcacctactcatccactgaccggtttgagggcaattttgtgcacggggagaaaaatggtcggggcaagttcttcttctttgatggatcaaccctggagggctactacgtagacgatgccttgcaaggacagggcgtctatacctacgaggacggcggcgtgctgcagggcacatatgtcgatggcgaattgaatggcccggcacaggaatacgacactgacgggcggctgatctttaagggccaatacaaagacaacatacgccatggcgtgtgctggatctactaccctgacggcggtagtctggtgggggaggtgaacgaagacggtgaaatgaccggcgagaagattgcctacgtgtatcctgacgagcgcaccgctctgtacggaaagtttattgacggcgagatgattgagggcaaattggcgaccctcatgtctactgaagaggggcggccccatttcgagctgatgccaggaaactccgtataccactttgataagtctacctcctcctgcatttccactaacgcgcttctgccagatccttatgagtcagaacgcgtgtacgtggccgaatccctcatttctagcgctggagagggactgttctccaaggtggccgttggacccaatacagtgatgagcttctacaatggcgtcagaatcacccaccaggaggttgattcacgagattgggccctgaatggaaatacactgagtcttgacgaggaaaccgtgatagatgtcccagagccctataaccacgtcagtaagtactgcgcaagtcttggccataaagccaaccacagctttacccctaactgcatctacgacatgtttgtgcatcctaggtttgggccaataaagtgcatacgcactctgagggccgtggaggctgacgaagaactgacagtggcttatggctatgaccactcaccccctggcaagtccggtcctgaagcccctgagtggtaccaagtggagctgaaggcgttccaggcaacccagcagaaataa

SEQ ID NO: 448 - DNA, 588 bp, synthetic construct
  source 1..588: mol_type = other DNA
atggccgcaggcatgtacctcgaacattacctggattccatcgagaacctgcctttcgagctccagaggaactttcagctgatgagagacttggaccagaggacagaagacctgaaggcagagattgacaaacttgccacggagtacatgtccagcgctcgctccctcagctcagaagagaaactggccctcctcaaacaaattcaagaggcctacggaaaatgcaaggagttcggcgacgataaggttcagctcgctatgcaaacctacgagatggtcgacaagcacattagacggctggatacagacctggcacgctttgaggctgacttgaaggagaaacagattgagtctagtgattacgatagcagctctagtaagggtaaaaaaaaaggtagaactcagaaggagaaaaaggcggcacgcgccagatccaagggcaaaaactctgatgaggaagccccaaagacagcacaaaagaagcttaaactggtgagaacatcccctgagtatggtatgccttctgtcacttttggatctgtgcacccctccgatgtcctggacatgcccgtagaccccaacgaataa

SEQ ID NO: 449 - DNA, 2640 bp, synthetic construct
  source 1..2640: mol_type = other DNA
gagcgaccccctgagacccctacggtggaccccactgtgaagtacgaacggcagcccgaatacctggatgccactggggggactctgcacccttatcagatggaggggctgaattggctgagatttagctgggcccagggcacagacaccattctcgccgatgagatgggcttgggtaaaacagttcaaacagctgtcttcctgtacagtctgtacaaagagggacacagtaaaggcccttttctggtttcagctccactgtcaaccatcatcaattgggagcgggagttcgagatgtgggccccagacatgtacgtggtgacatacgtgggggacaaggattctcgggccatcatccgggaaaacgaattcagttttgaggacaacgctattaggggagggaaaaaggctagcagaatgaaaaaggaagcctccgtgaaatttcacgtgcttctcacctcctatgagcttatcacaatcgatatggcaattctgggctctatcgattgggcgtgcctcattgtcgacgaagcacataggcttaagaacaaccagagcaagttctttagagtgctgaacgggtattctctgcagcacaagctcctgcttactggaacccccctccagaacaatctggaagagcttttccatcttttgaacttcttgacaccagagaggttccacaaccttgaggggttccttgaggagtttgccgacatagccaaggaagatcagatcaagaaactccatgacatgctcggacctcacatgctgcgacgcctcaaggccgacgtgttcaagaacatgccaagtaagaccgaattgatagtcagagtggagctgtcccccatgcagaaaaaatattacaagtacatcctgactcgaaattttgaggccttgaatgcaagaggtggcggaaaccaggtcagtctcctgaacgtagtgatggacctcaagaaatgctgcaaccatccatacctcttccctgtagccgctatggaagctccgaaaatgccgaacggcatgtatgacggaagtgcgctgattcgagcgtccggcaagctgcttttgctgcagaagatgcttaaaaatctcaaagaaggtggacacagggtactgatctttagtcagatgactaagatgctggatcttcttgaagatttcctcgagcatgaaggctataagtatgagcgaatcgacgggggtataactggaaacatgaggcaggaagctatcgataggttcaacgcgcccggtgctcagcagttttgttttctcctgagcactagagccgggggactcggaattaacctggccactgccgacacagtgatcatctatgacagcgactggaatcctcacaacgacatccaagcctttagtcgggcccatcgcataggccaaaacaaaaaagtgatgatttatcgcttcgtcaccagagcctcagtggaagaacggataactcaggtagcaaagaagaagatgatgctgacgcatcttgttgtcaggcccggtctcgggtccaaaactgggtctatgtctaaacaggaactggacgacattctgaagttcggcacagaggagttgtttaaggatgaagctactgacggaggcggcgacaataaagaaggggaagacagcagtgtgattcattacgatgacaaggccatcgaaagactgcttgatagaaaccaggacgaaacggaagataccgaactccagggtatgaatgagtacctctcaagctttaaggtcgctcagtacgtagtaagagaagaggaaatgggcgaggaggaggaagttgagagagagattatcaagcaggaggaatccgtcgatcccgactattgggagaagctgctgcgacatcactacgagcagcaacaggaggatctggctcggaatctcgggaaggggaaacggattcggaagcaggtcaactacaacgacggctctcaagaggatcgcgattggcaagatgatcaaagcgataaccaaagtgattatagcgtagccagtgaagagggagacgaggattttgacgagagaagtgaagctcccagacgaccgagtcggaaaggcctgcggaatgataaggataagcctctcccacctttgttggcgagagtggggggcaacattgaggtcttggggtttaatgcacgacagcggaaggctttcctcaatgccatcatgcggtatggcatgcctccacaggacgccttcactacccagtggctggtgagagatctgcgaggcaaaagtgagaaggagttcaaagcttatgtctctctgtttatgcggcatctctgcgagccaggagccgacggcgccgagacgtttgcagatggggtcccccgagagggtctgtccagacagcatgtgctcaccaggatcggggtgatgagtctgataagaaaaaaagtgcaggagtttgagcatgtcaatgggcgctggtctatgcctgaattggccgaggtagaagagaataagaagatgtcccaacctggctccccatctcccaaaacgcctacgccgagcactccaggggacacccagcctaataccccagcaccagtgcctccagcagaagatggcattaagatcgaggaaaatagtctcaaagaggaggagagctaa

SEQ ID NO: 450 - DNA, 1011 bp, synthetic construct
  source 1..1011: mol_type = other DNA
atagagggggaaaaggaagtgaaatccacagccccagagacagcaattgaatgcacacaggcacccgccccagccagcgaagacgaaaaagtggtggtcgaaccaccagaaggagaagaaaaggtggaaaaggctgaggtgaaggaaaggaccgaggaaccaatggagaccgagcctaagggtgctgccgatgtagagaaggtcgaggagaagtccgccatagacttgacccccattgtggtagaggataaagaggagaagaaggaagaagaggagaaaaaagaagtgatgctgcagaacggcgaaacgcctaaggacttgaacgacgagaaacagaagaagaacattaaacaaagattcatgttcaatattgccgatggaggtttcactgaactgcactcactgtggcagaatgaggaacgagctgcgacggtgaccaagaagacctacgagatatggcatagacgccacgattattggcttcttgccggtattatcaaccacgggtatgccagatggcaggacatacagaatgatccccgctatgctatcctgaatgaacccttcaagggagaaatgaataggggtaatttccttgagattaagaataaattccttgctaggagattcaagcttttggagcaggccctggtcatcgaggagcagcttaggcgcgccgcctaccttaacatgtctgaagacccatctcacccctctatggctttgaatactagatttgccgaagtggaatgcctggctgagagccatcagcatctgagtaaggagtccatggcaggaaacaaacccgcaaatgccgtactgcataaagtgctgaagcagctggaggaattgctgtccgacatgaaagccgacgtaacaaggctgcctgctaccatagcccgaattccgcctgtcgccgtgcggctgcaaatgtctgagcgcaacatcctcagccgccttgccaacagggcccctgagccaactccccagcaagtcgcacagcaacaataa

SEQ ID NO: 451 - DNA, 1914 bp, synthetic construct
  source 1..1914: mol_type = other DNA
atggcagcgatggctgttggcggcgccgggggtagtcgggtgtcctctgggagagacttgaactgcgtcccggagattgctgataccttgggtgccgtcgcgaaacagggatttgacttcctctgcatgccagttttccacccccgcttcaagcgagaattcattcaggagccagctaagaatcggcctgggcctcagacacgaagcgacctgctgctttccggtcgcgattggaataccttgatagtcggcaagttgagcccttggataaggcctgactccaaggtggagaagatcagacgcaactcagaggcagctatgcttcaggagctgaacttcggcgcgtatcttggcctgccagcctttctccttcccctcaatcaggaagacaacactaaccttgcccgagtgctgacaaatcacattcatacaggtcaccattccagcatgttttggatgagagtccctcttgtggcccccgaagacctgagagatgatattatagaaaacgcacccaccactcataccgaggaatattcaggcgaggagaaaacatggatgtggtggcacaattttaggacactctgcgactactccaaacgaatcgcggttgccctggagattggggccgatctccccagtaaccacgtgattgatagatggcttggagaacccatcaaggccgcgatcctcccaacatctatctttctcactaataaaaaagggttcccagtactgtccaagatgcatcagagactgatatttcggcttctcaaactggaggtccaatttatcattaccgggacaaatcatcacagcgaaaaagaattttgttcctatctgcagtacctcgaatacttgtcccagaatcggccacctccaaatgcgtacgaactttttgcaaagggctacgaggattacttgcaatcacctctccagccactgatggataacctggagtcacagacctatgaggtctttgagaaagacccaatcaagtattcccagtatcagcaagcaatctacaaatgccttctcgatcgcgtccccgaagaggaaaaagacaccaatgtccaagtactgatggtcctcggggccggccggggacccttggtgaatgcatctctgagggccgccaagcaggctgacagacgcataaaactctacgcagtggaaaagaaccctaatgctgttgtaacactggagaattggcagtttgaagagtggggatcacaggtgacggtagtgtcttctgacatgagggagtgggtggcccccgaaaaggccgatatcatcgtgtctgagctgctcggcagctttgccgacaacgagctgtcaccggagtgtctcgatggagcccagcactttttgaaggacgatggagtaagcattcccggggagtacacctcttttcttgccccaatttcaagcagcaagctgtataacgaggtacgcgcctgtcgcgagaaggacagagacccagaagcacagttcgagatgccttatgtggtgcgattgcacaactttcaccagctcagtgcccctcagccctgcttcacattctcccacccgaacagggatcctatgatagataacaatcggtattgcaccctggagtttcctgtggaggtgaacaccgtgctgcacggcttcgccggctacttcgaaaccgtgttgtatcaggacatcacgttgagtattaggcctgagacacactcccccgggatgttttcttggttccccatactgttccctatcaagcagccaattacggttcgggagggccaaaccatttgtgtgcggttttggagatgttcaaattctaagaaagtgtggtacgagtgggccgtgaccgctcccgtttgctccgctatccacaatccaacgggcaggtcatacacgatcggactgtaa

SEQ ID NO: 452 - DNA, 1473 bp, synthetic construct
  source 1..1473: mol_type = other DNA
atgaccattgggcggatggagaatgtggaagtttttacagcagaaggcaagggaaggggcttgaaggccacaaaggagttctgggccgccgacatcatctttgccgagagagcatattcagctgttgtgttcgattccctggtcaacttcgtgtgtcacacctgcttcaaacgccaagaaaagcttcatagatgcggccagtgtaaatttgcacactactgtgaccggacatgccagaaagatgcatggttgaaccacaagaatgagtgcagtgcgatcaagcggtacggtaaggtccctaatgagaatatacgcttggcggcccgaataatgtggagagtggagagagaaggcactggactcaccgagggctgtttggtgtccgtggatgacctccagaatcatgttgaacatttcggcgaggaagagcagaaggaccttcgcgtggacgtggacacattcttgcagtactggcctccccagtctcagcaatttagcatgcagtatattagccacatctttggggtgataaactgtaacggcttcactctttctgaccagcgcggcctgcaggcagtgggggtggggatcttcccaaacctcggcctggtcaatcacgactgttggcccaactgcacggtcattttcaacaatgggaatcacgaagcagtaaagagcatgtttcatacccagatgcgaattgagctgagagctctgggtaaaattagcgaaggagaagaactgaccgtgagctacattgacttcttgaacgtttccgaagagagaaagcggcagctgaagaagcagtactactttgactgtacatgcgagcactgtcagaaaaaactgaaagatgacttgttcctgggagtaaaagataaccctaagcctagtcaagaggtggtgaaagaaatgatccagttctcaaaagatacactcgaaaagattgacaaagcccggtctgaaggcctttaccacgaagtggtcaaactctgcagagaatgcttggaaaagcaggagcccgtcttcgctgacacaaatatctatatgctccgcatgctgagcatcgtgtccgaggttctcagctacctccaggcgtttgaagaggctagtttttacgcgagaagaatggttgacggctacatgaagttgtatcacccgaacaacgcacaactgggtatggccgtcatgcgcgctgggctcactaactggcacgcaggcaatattgaggttggccatggaatgatctgtaaagcttacgccatactgctcgtgacccatggccctagccacccgattactaaggatctcgaagccatgcgcgtccagacagaaatggaattgcggatgttccggcagaatgaattcatgtattacaaaatgcgcgaggcagctctgaataatcagcctatgcaagtaatggcagagccatctaatgaacccagtcccgccctgtttcacaaaaaacagtaa

SEQ ID NO: 453 - DNA, 1281 bp, synthetic construct
  source 1..1281: mol_type = other DNA
atgtctgggggcgtttacgggggagatgaagtgggtgctctcgtgttcgacatcggaagctttagcgtaagagcgggctacgctggagaagattgcccgaaagcagacttcccaaccaccgtcggcctgcttgccgcagaagaaggcggcggtctggaactcgaaggggacaaggagaaaaagggcaagatcttccacatcgatacgaacgccctgcacgtgccaagagacggagccgaagtaatgagcccgctgaagaacggaatgatagaggactgggagtgttttcgcgcgattctcgatcatacctattctaagcatgttaagagcgaaccaaatcttcatcctgtgttgatgagcgaggcaccgtggaacacaagagccaagagggaaaagctcacggagttgatgtttgagcaatataatattccagcctttttcctttgcaagacggctgtgcttaccgctttcgcgaacggtcggtcaacaggccttgtactggactccggcgccactcacacaacagccatcccagtccatgatgggtacgtactgcagcagggtattgtgaaaagcccccttgctggtgatttcatcagtatgcaatgcagagagctgttccaggagatggcaattgacatcatcccaccctacatgatcgcggcgaaggagcctgtgagagaaggcgctccccccaattggaagaagaaggaaaaacttcctcaggtgagcaaatcttggcataattacatgtgcaatgaggttattcaggatttccaagccagtgtgctgcaggtcagtgatagtccctatgacgagcaggtggccgcccagatgcctactgtgcattatgagatgccaaatggctacaatactgattacggcgcagaacgacttcggattcccgaaggcctgtttgatccttcaaatgttaaaggactctctgggaataccatgttgggcgtcgggcatgtggttaccacgagcattggcatgtgtgatatcgacatccggccagggctgtacggatcagtaattgtgactggagggaacaccctcttgcagggcttcaccgatcgcttgaatcgggagcttagccaaaagacacctccctccatgcgcttgaaactcattgccagtaattcaacaatggagaggaaatttagcccttggattggggggtcaatactcgccagcctcgggacttttcagcaaatgtggatctcaaaacaggagtatgaggaaggcggaaagcagtgcgtggaaaggaaatgtccctaa

SEQ ID NO: 454 - DNA, 2118 bp, synthetic construct
  source 1..2118: mol_type = other DNA
tatcgccttcgcaagagcagacccagaagtgagacagaggagatgggggacgaggaggtcttctcatggctcaagtgcgccaaggggcagagccacgaaccggaaaacttgatgcctacgcagataatccccggcaccgccctctacaacattggcgacatggttcacgcagccagaggaaaatggggcattaaagccaattgcccatgcatcagtcgacaaaacaaatcagttcttaggcccgctgtgaccaatggaatgtctcaacttccaagtataaatccctctgcctccagcgggaacgaaactactttttcaggcggggggggaccagccccggtgacaacgcctgaacccgaccacgtcccaaaagctgattccactgacatccgctctgaagagcccctcaagaccgactcatccgcatccaattccaactcagaactgaaagcaatccggccaccttgtccagataccgcgccacctagctctgccctccattggctggctgatctcgccactcagaaggccaaggaggagaccaaggaagcagggagtctgcggagcgtgcttaataaagagtcccattcaccctttgggttggatagcttcaattctacagccaaggttagtcccctcactcctaaactgttcaattctcttctcctggggccaaccgcctccaataacaagaccgagggttctagtctgagagacttgctccattccggccccggcaaactgccacagaccccccttgatacagggatcccttttccacctgtgttttcaaccagctctgccggagtgaagagcaaagcgagccttccaaacttcttggaccatatcatcgcctccgttgtggaaaacaagaaaacttctgatgccagtaagcgcgcttgcaaccttactgacacgcagaaggaggtgaaagaaatggtcatgggactgaatgttctggatccacacacttctcattcctggttgtgtgatggccgcctgttgtgtctgcatgacccgagcaacaaaaacaattggaaaattttcagggagtgttggaaacaaggccagccggttctggtgtccggcgtgcacaagaaactgaaaagcgaactgtggaagcctgaggcattctcccaggagtttggagaccaagacgtagacttggttaattgtagaaattgtgccattatcagcgacgttaaagtcagagacttctgggacggtttcgagatcatatgcaagcgactgcgatccgaggacggacaacctatggtgctgaaacttaaagactggccgcccggcgaggatttcagagacatgatgcccactaggttcgaggatctcatggagaacctgccccttccagagtataccaaacgcgacggccggttgaacctcgcgtcccggctgcccagttacttcgtcagacctgacctgggacccaaaatgtacaacgcctatggacttatcaccgccgaagatcgcagggtgggcacaacgaacctgcacttggacgttagcgacgcggtgaacgtgatggtctacgttggcatccccattggggagggggcacacgatgaggaagtgcttaagaccattgatgagggtgatgctgatgaagtgactaagcaacgcattcatgacggaaaggagaaacctggcgccctctggcacatatatgccgcaaaggacgccgagaaaatcagggagctgctgcggaaggttggggaagagcaggggcaagaaaatccccccgaccacgatcccatccacgatcagagctggtatctcgatcaaacattgaggaaacgcctgtacgaagaatacggcgtacaagggtgggcaattgtccaatttctgggtgacgccgtgttcataccagccggagccccacaccaggtgcacaatttgtattcatgtatcaaagtcgctgaggattttgtatcacccgaacatgtgaagcactgttttcgattgacccaagaatttcgccacttgtcaaacacccacactaatcatgaagataaactgcaagtgaagaacattatttatcatgccgttaaagacgcagtcggtacgcttaaggctcacgaatccaaattggcccgctcttaa

SEQ ID NO: 455 - DNA, 1422 bp, synthetic construct
  source 1..1422: mol_type = other DNA
atggccacccaggccaagcggcctcgcgttgccggcccggtggatggcggggatcttgatcccgtggcctgtttcctgagctggtgcaggcgggtcggtctggagctttctcccaaagtgtcagaaagggcagggggcagacgcacacgaggtggcgccagggctgccctgaccagtccccccgcacaggttgccgtatccagacaggggactgtggcgggatacggcatggtcgctcgggagtcagttcaggcaggtgaactgctgttcgtggtcccgagagccgctctgctgtcccagcacacatgcagcataggaggacttttggagagagagcgcgtggcccttcagagtcagagcggttgggtacctttgctgctggccctgctgcatgaactgcaagcccccgcctctagatggaggccgtactttgctttgtggccagaactcggtagactggagcacccgatgttttggcccgaggaggagcgccgatgcctccttcagggaacaggtgtgcctgaggcagttgaaaaggacttggcgaacatccgctcagaataccagtcaattgtgctgccattcatggaggcccaccccgacctcttctccctgcgagtgaggagtctggagctttatcatcagctggtggccctggtcatggcatatagtttccaggagcccctggaggaagaggaggatgaaaaggaacccaattcaccagtgatggtgccagctgcggatatcctcaaccacttggccaatcacaacgcaaatcttgagtacagcgcgaactgcctgagaatggttgcgacccagccaatcccaaagggacatgaaatatttaacacatacgggcagatggccaattggcagctgattcacatgtatggcttcgtggaaccttacccggataacacagacgacaccgcagatatccagatggttactgtgcgagaagcagcgctgcagggcacgaagactgaagccgagagacacctggtctacgaaagatgggactttctgtgcaagctggaaatggtgggggaagaaggcgcgttcgtcattggaagggaggaagtgttgacggaggaagaacttactaccactctgaaggtcctgtgtatgcctgcggaagaatttcgagagctgaaagatcaggacggaggcggagacgacaagcgcgaggaaggttctctgaccattaccaacattccgaaactgaaggcctcttggagacagcttcttcagaatagtgtcctcctgaccctccaaacttacgccacagatctgaagaccgaccagggacttttgtcaaataaagaggtgtacgccaaactgtcttggagggagcagcaagcgctgcaggtgcgctatgggcaaaagatgattctccaccagctgctggaactgacttcataa

SEQ ID NO: 456 - DNA, 2457 bp, synthetic construct
  source 1..2457: mol_type = other DNA
cgcttttcctgggcgcagggcactgacactattctggcagatgaaatggggctgggtaagactatccagacaattgtgttcctgtatagcctttacaaagagggccatactaaagggcccttcctcgtctcagctccactgtctactattattaactgggagcgcgagtttcaaatgtgggccccaaagttctatgttgtcacttatactggcgacaaggattcacgggcgattatacgggaaaatgagttcagcttcgaggataacgctatcaaggggggcaaaaaggcttttaaaatgaagcgggaagcacaggtcaaattccatgtgctgctgacgagctacgagttgattaccattgatcaggcagcattgggctccatccgctgggcttgcctcgtagtggacgaagcacatcggctcaaaaataatcagagcaaatttttccgggtcctgaacggatacaagatcgatcacaaactgctgctgactggaaccccactgcagaataacttggaagaactgttccacctgctgaattttctgacccctgagcgctttaataatctcgaagggtttctcgaagagttcgctgacatatcaaaggaagatcaaatcaagaaactgcacgatctcctgggacctcacatgctgaggcgcctcaaggcagacgtgtttaaaaacatgccagctaagacggaactgatcgttcgagtcgagttgagtcccatgcagaagaaatattacaagtatattctgacgcgaaacttcgaggccctgaacagtagagggggaggtaaccaggtgtctctgctgaatatcatgatggatctcaaaaagtgctgcaatcacccttatttgttccccgtggccgctatggagagtccaaagctcccatccggcgcatacgaaggaggcgccctcatcaaaagcagcggtaaattgatgctcctccagaagatgctgagaaagctcaaagagcagggccatagggtgctcatattcagccagatgaccaaaatgctggacctcctcgaggatttcttggattacgaaggttacaaatacgagcggattgacggaggcatcaccggcgccttgcgacaggaagccatcgaccgcttcaatgctcccggagcacaacagttttgttttttgctgtccactcgggctggaggtctgggcatcaacctggccaccgcggatacggttatcattttcgacagcgattggaatcctcataatgacatacaggctttttcccgggcacaccggatcggccaggctaacaaggttatgatatatcggtttgttacaagggccagcgtcgaggagagaatcacacaggtggctaaaaggaagatgatgctcactcacttggtggttcgccctggactgggaagtaaggccggatctatgagcaagcaggaactggatgatatcctgaaattcggtaccgaggagctgtttaaagatgagaatgagggggaaaataaggaggaggactcatcagttatccactatgacaacgaagccatcgcccgcctgctggataggaaccaagacgccaccgaagataccgacgtgcagaacatgaatgagtacttgagcagttttaaggtggcccagtacgtggtcagggaagaggataagatcgaagagatcgagcgggaaattataaaacaagaggagaatgtcgatccagactactgggagaagctgctgcggcaccactacgaacaacagcaggaagatctggcccgcaatctgggaaagggtaagcgggttaggaagcaagtgaattacaacgacgctgcccaagaggaccaggacaatcagtctgagtacagcgttggcagtgaagaagaggatgaggacttcgatgagcgacccgagggcagacggcagtccaagcgacagctgcgcaatgaaaaggataaaccactgccccctttgttggcccgggtgggcggaaacatcgaggtcctcggcttcaatactcgacagaggaaggccttcttgaatgctgtgatgcggtggggaatgcctccgcaagacgccttcactacccagtggctggtgagggacctgagggggaaaactgagaaggaattcaaagcctacgtgtccctgttcatgcgccacctctgcgagccgggcgccgatggctcagagactttcgccgacggggtgccgagggagggactgtcccgacagcaagtgttgacaaggattggcgtaatgtccctggtaaagaagaaagtgcaagagtttgagcacatcaacggccggtggagcatgcccgagctgatgccagacccctctgctgacagcaagagaagcagtcgggcctcctcacccaccaagactagcccgactactcctgaggcgagcgcgacaaatagcccttgtaccagcaaaccagccaccccagcaccatccgagaagggcgaataa

SEQ ID NO: 457 - DNA, 1308 bp, synthetic construct
  source 1..1308: mol_type = other DNA
ggtattcgaaccccgcttgaaaaagaagaagccgagaatcaggaggagaagcccgaaaaaaactcacgaatcggggagaaaatggagaccgaagcagacgcaccatcacctgccccttccttgggcgaacgactcgaaccccgcaagatccctttggaagacgaggtgcctggagtccccggcgaaatggagcctgaacccgggtacaggggcgaccgcgaaaaaagcgctaccgagtctacaccaggcgaaaggggagaggaaaagcctctcgatggacaggaacaccgcgaacggccagagggggaaaccggtgacctcggaaaaagggaagatgtgaaaggagacagagaacttcggccaggacctcgggatgagccccgaagtaatggacgcagagaagagaaaaccgagaagccacgcttcatgtttaacattgcggatggagggttcaccgagctgcatacgctctggcagaacgaagagagagccgcaattagttccgggaaactcaatgagatctggcataggagacatgactactggctcctggcgggcatagtcttgcacggctatgctcggtggcaggatatccaaaatgatgctcagtttgcaattatcaatgagccctttaagaccgaagctaacaaaggcaactttctggaaatgaaaaataagtttttggcacgaagattcaagctgctggagcaggccctcgttatagaagaacaactgaggagagctgcatacctgaatctctcccaggagccagctcaccctgcaatggccctccacgctaggtttgccgaggcagagtgtctggccgaaagccatcaacacctttcaaaagaaagcttggctggaaataaacccgctaacgctgttctgcacaaagtgctcaatcagttggaggagctgctgtctgatatgaaagcggatgttaccaggctgcccgctactctgtctagaattcccccgatcgccgctaggctgcaaatgtccgaaaggtccatcttgtctagactggcctcaaaggggacagaaccacatccaactccggcttaccctccagggccctatgcgactccgccggggtatggagcagcgttttcagcagcccctgttggagcactggctgcagccggggcaaactattctcaaatgccggccggcagcttcattacggccgcgacgaacggcccgcctgtcctggtgaagaaggagaaggaaatggtgggcgcactcgtttctgacggcctggatcggaaagagccccgcgccggtgaggtgatttgtattgacgactaa

SEQ ID NO: 458 - DNA, 495 bp, synthetic construct
  source 1..495: mol_type = other DNA
ctgagcaagctgagcatccaggataacaatgtggacctgatcttggcgacaccgccatttagccggcttgaaaaactctactcaactatggtacgcttcctcagcgacagaaaaaaccctgtatgtcgcgagatggccgtggttcttctggcgaatctggcacagggcgactcactggccgcccgagctatcgccgtccagaaagggtccatcgggaacctgctgggatttctcgaggattctcttgctgccactcaatttcagcagagccaagcctccttgttgcacatgcagaacccccctttcgagcctactagcgtggatatgatgaggagagccgccagggcccttctcgcccttgccaaggtggacgagaaccattccgagttcactttgtatgaatccagactgttggacatatctgtcagtccactgatgaacagtctggtctctcaggtgatctgtgacgtgctgttcctcatcgggcagtcttaa

SEQ ID NO: 459 - DNA, 579 bp, synthetic construct
  source 1..579: mol_type = other DNA
atggcagcccagattcctattgtggcgaccacatccacccccggcatcgtgcgcaacagcaagaaaagaccagcatcaccctcccataacggaagcagtgggggtgggtacggcgccagcaaaaagaaaaaggcaagtgcttctagcttcgctcaggggatctctatggaagctatgtctgagaataagatggtgccttccgagttctccaccggccccgttgagaaggctgctaaaccgttgcctttcaaggacccgaatttcgtacatagcggccacggcggggccgttgccggtaaaaagaaccgaacctggaaaaatttgaagcagattctcgcgagtgagagggctttgccgtggcaactgaatgacccgaattacttctctatagatgcccccccgtccttcaaacccgccaagaaatactccgacgttagcggactgctggctaattacacagacccgcaatctaagctgcggtttagtacaattgaggaattttcctacattcggcgcttgccctcagatgtggtaacaggctacctggcactgagaaaggcaacgtccatcgtcccctaa

SEQ ID NO: 460 - DNA, 1374 bp, synthetic construct
  source 1..1374: mol_type = other DNA
atgggccctggttgcgacttgctgctgcgaaccgcggcgacgataacagccgcggctatcatgtcagataccgattccgacgaagattccgctgggggcgggcctttcagtctggcaggtttcttgtttggcaacataaacggcgcaggtcaactggaaggtgagagcgttctggacgacgagtgcaaaaaacatctggctggcctcggcgccctcggcctgggtagtcttattactgagcttaccgccaacgaagagctgaccggaacagatggcgccctggtcaacgatgagggttgggtaagaagcaccgaagacgccgtggactattctgacattaacgaagtggcagaggacgaatctcgccggtatcagcagacaatgggctctttgcagccactgtgccattctgattacgacgaggacgattacgacgcagactgtgaggacatcgactgcaaactcatgcctcctccccctccccccccgggacctatgaaaaaggacaaggaccaagatagtatcactggagagaaagtggacttctccagcagtagtgattccgagtccgaaatgggcccacaggaggcaacacaggccgagagtgaggacggaaagctcacattgccgcttgcaggcattatgcaacacgacgcgacaaaattgctgccatctgtcacggagttgttccctgaatttcgccctgggaaggtgctgcgctttctccgcttgttcgggccgggaaagaacgttccctctgtgtggcgctccgctaggcgcaaacgaaaaaagaagcaccgagagctgattcaggaggaacaaatacaggaggtcgaatgtagcgtggaatcagaggtttcacagaaaagtctgtggaactacgattacgcccccccaccaccaccggagcagtgtttgagcgatgatgaaatcaccatgatggcgcccgtggagagcaagtttagccagagtacgggagacatcgacaaggtgacagatactaagcctcgggtggcagagtggaggtacggccctgcacgactgtggtatgacatgttgggcgtgcccgaggacgggtctggtttcgactatgggttcaagttgcggaagaccgagcacgaacccgtgattaagtctagaatgatcgaggaatttaggaagctcgaagagaacaacgggacagatctgttggcagatgaaaacttcctcatggtcacccaactgcactgggaggatgacatcatctgggatggtgaggatgtgaaacacaaaggcacgaagccccaaagagcctcacttgctggatggctgcccagctccatgacccggaacgccatggcttataacgtccagcagggctttgctgccacataa

SEQ ID NO: 461 - DNA, 1689 bp, synthetic construct
  source 1..1689: mol_type = other DNA
ctcgacgacgacaaaccatggtatagtatcttccccatcgacaatgaggacctggtctacggcagatgggaagacaatatcatttgggatgcacaggctatgccccgcctccttgagccccccgtattgaccttggatcctaatgacgaaaatctcattcttgagatacctgacgagaaagaggaggctacttccaacagtccctccaaggagtctaaaaaggagtccagcctcaagaaatcccggatactgctgggaaagacaggagtcattaaggaggagccgcagcaaaatatgagccaaccagaagtcaaagacccctggaacttgtctaacgacgaatactattaccccaaacagcagggactcagaggcacatttgggggcaatattattcaacattccatccccgcagtggaactcagacagcctttttttcctacccatatgggccccatcaaactcaggcaattccatagaccaccgctgaaaaaatacagttttggagctctgagccagccaggtcctcattccgtccagcccctcttgaagcacattaagaagaaggccaaaatgcgggaacaggaaaggcaggcttctgggggcggagaaatgttttttatgcggactcctcaggatctcactggtaaggatggcgacctcattctcgccgagtattctgaggagaacggccctttgatgatgcaggttggaatggccactaaaatcaaaaattattacaaacggaagcccggtaaggatcccggagccccagactgcaagtacggagagaccgtctattgccataccagcccattcctgggctcactgcaccccggacagctccttcaggcctttgaaaataacctgttccgggcccccatctaccttcataaaatgcccgaaactgactttctgatcataagaacaagacagggctactacattcgggagctggtcgacatttttgtggtaggtcagcagtgccctctgtttgaggtccccggccctaactctaagcgagcaaatacacacattagagacttccttcaggtgtttatctaccgcctgttttggaagagtaaggatcggccccggaggatacggatggaggatattaagaaggccttcccgagtcatagcgagtcatctatccgcaaaaggcttaagctctgcgctgactttaaaaggacgggcatggactccaattggtgggtcctcaagagcgacttcaggctgccaaccgaggaggaaatcagggccatggtgagccccgagcagtgctgcgcatactactctatgattgctgcagaacagcggctcaaagacgccggatatggagaaaaaagcttcttcgccccggaggaggagaatgaggaggattttcagatgaaaattgatgacgaggttagaaccgcgccctggaacaccacacgagccttcatagccgctatgaaagggaagtgcctcctggaggtgacaggtgttgctgatcctaccggatgcggtgaaggcttctcatacgtgaaaattcctaacaagccgactcagcagaaggacgacaaggagcctcagccagttaagaagacggtgaccggcacagatgctgatctcaggaggcttagcctgaaaaacgccaaacagctgctgcgcaaattcggagtccccgaggaggagatcaagaaataa

SEQ ID NO: 462 - DNA, 1596 bp, synthetic construct
  source 1..1596: mol_type = other DNA
gttttgaaatttcccaagcagcaactgcctcctaagaaaaagcgacgcgtaggaactaccgtgcactgtgattatcttaataggcctcataaatctatccacaggcgaaggacagaccctatggtcaccctctctagcattctggaatctattatcaacgacatgagggaccttcctaacacatatccatttcatacgcccgttaacgctaaagtcgttaaggactactacaagattattacaaggccaatggacctgcaaacacttcgggagaacgtgagaaagcggctctacccgtccagggaggaattccgggagcacctggagcttatcgtcaaaaacagtgccacctacaatggcccaaagcacagcttgacacagatctcccaatccatgctggatttgtgcgacgagaagctcaaggagaaagaagataagcttgcacggctggagaaggccattaatccactgcttgatgatgacgaccaagtggccttctcattcatcttggataatattgtaacacagaaaatgatggccgtacctgacagctggcctttccatcaccccgtgaataagaagttcgtgcctgattattacaaggtgattgtgaaccccatggatttggaaacaattaggaaaaatatttctaaacacaaataccaatcccgggagtcctttttggacgacgtcaatctgatcctcgccaactctgtgaagtacaatggcccagaaagtcagtacaccaagaccgcgcaggagatagttaatgtctgctatcagaccctgacggagtacgacgagcatctcacccagctggagaaggatatctgcaccgccaaagaggcagctctggaggaagccgagctcgagagcctggaccccatgactccagggccatataccccacagcccccggacctttatgacaccaacacttccctttcaatgagccgagatgcctcagttttccaagacgagagcaatatgtcagttctggatatcccgagcgcaaccccggagaagcaggtcacgcaggagggggaagacggggatggagatctggctgacgaagaagaagggactgttcagcagccacaggcttctgtgctctatgaggaccttctgatgagcgagggcgaagacgacgaggaagatgcaggtagcgatgaggagggggacaatcctttttccgcaatacaattgtcagaatcagggtccgacagtgatgtggggtccggtggaatccgccctaagcagcctagaatgcttcaggaaaacacccggatggatatggagaatgaagagtccatgatgagctacgagggggacggcggagaagcgagtcatggcttggaagactcaaatattagttatggcagttacgaggagccagacccgaagtctaacacacaggacacctccttttcttccatcggcggttacgaggtttctgaggaggaagaggacgaggaggaggaggagcagagatcaggaccgtccgtgctgtcccaggttcatctgtccgaggacgaagaggactcagaagattttcacagtattgccggagatagtgacctggacagcgatgagtaa

SEQ ID NO: 463 - DNA, 1428 bp, synthetic construct
  source 1..1428: mol_type = other DNA
atgcccaagctcaaagccaagccaattaggactgccagcggcatcgcggtggttgccgtgatgtgcaaacctcaccggtgcccccacatctcttttaccggcaatatctgtgtatactgccccggcgggcccgatagcgattttgaatacagcactcagtcatacaccggctatgagccgacctcaatgcgcgctattagggcaaggtacgatcccttcctgcagacgcgccatagaatcgagcaactcaagcagctggggcactccgtggataaagtagagttcattgtgatgggaggcacgtttatggcccttcctgaggagtaccgcgattatttcatcagaaacctgcacgacgcactgagtgggcataccagtaacaatatttacgaggccgtcaagtacagcgaaagatctcttaccaaatgcatcgggatcaccattgaaaccaggccagactactgtatgaagagacacctctcagatatgctgacttatggttgcacacggctggagatcggagtgcagagcgtgtacgaggacgtggcccgcgatacaaaccgcgggcatacagtcaaggcagtgtgcgagtcttttcacctcgcaaaggacagtggctttaaagtggtagctcacatgatgcccgatctccccaacgtgggcctcgagcgggatattgagcagtttactgaattcttcgaaaaccctgcctttcgcccagatggtctgaaactttaccccaccttggtcattagaggaaccggcctgtatgagttgtggaaatctggtagatataagtcttacagcccttctgatctggtcgagctggtggcgaggatcctggctctggttcccccttggacaagagtttatagagtgcagagagacatcccaatgcctttggtctctagtggagtggagcacggtaacctgagggaactggccctggcccggatgaaagacctgggtatccagtgtcgcgacgttagaactagagaagtgggaatacaggagattcaccacaaagtgaggccttaccaggtggagctcgtgcggagggattatgttgctaacggaggatgggagaccttcctgagctacgaggatccagaccaggatatccttatcggactgctcagattgcgcaagtgtagcgaggagacctttcgcttcgagcttggcggcggtgtctcaattgtgcgcgagcttcatgtgtatggttctgtggtcccagtgtccagcagggaccccacaaaattccagcaccagggcttcggcatgctgctcatggaagaggcggaaaggatcgcacgcgaggaacatggcagtgggaaaatcgccgtgatttccggggtcggaaccagaaattactacagaaaaatcggatataggctgcaaggcccgtacatggtgaagatgctgaaataa

SEQ ID NO: 464 - DNA, 435 bp, synthetic construct
  source 1..435: mol_type = other DNA
atgcgggctcaccccggcggcggacggtgctgtcctgagcaggaggagggcgagtcagctgccggcggatccggagccggaggcgattccgccatcgaacagggcgggcagggaagcgccttggcgccaagccccgtgagcggcgtgcgcagggagggggcacgcggcgggggaagggggcggggacggtggaaacaggccggacgaggcggaggagtttgtggccggggccggggaaggggccgagggcggggcaggggcagaggtaggggcaggggaaggggtaggcccccaagcgggggttctgggctgggcggtgacggaggcgggtgcgggggcggtggctccggaggcggcggtgcccctcgccgcgagcccgtgcccttcccctccggatcagctgggcctggtcccaggggacccagggccacataa

SEQ ID NO: 465 - DNA, 597 bp, synthetic construct
  source 1..597: mol_type = other DNA
atgcctagtaagctgcagaagaacaagcagaggctgcggaacgaccccctgaaccagaataaaggaaagccagacctgaatacaacattgcctattaggcagacggcctccatctttaagcagcccgtaaccaaagtcaccaaccatccatccaacaaggtgaagagtgaccctcagaggatgaatgaacagccgcggcagctgttctgggagaaaagacttcagggactgtcagcttccgacgttaccgagcagataattaagaccatggagctccccaaaggtctgcagggagtcggcccaggtagcaatgatgagacattgttgtcagccgttgccagcgcccttcacacgtctagcgcacctatcacaggacaagtatctgcggccgtagagaagaatcctgccgtctggctgaatactagccagcctctttgtaaggcattcatcgtaaccgatgaagatatccgcaagcaggaggaaagagtccagcaggtcaggaaaaaactggaggaggccctgatggctgacattctcagcagggccgctgacacggaggagatggacattgaaatggattccggcgatgaggcctaa

SEQ ID NO: 466 - DNA, 639 bp, synthetic construct
  source 1..639: mol_type = other DNA
atggtgaagctggccaaccctctttacacggagtggatcctggaggccatccagaagattaaaaagcagaagcaaagaccttctgaggagcgaatctgccatgctgtcagcaccagccatggcctggacaagaagactgtatcagaacagctggaactcagcgtccaggacgggagcgtgcttaaggttaccaataaagggttggcctcatataaggacccagataacccaggccgcttctcatcagtgaaacccggcactttcccaaagtctgctaagggatctaggggttcctgtaacgacttgagaaacgtcgattggaacaagcttcttagacgggcaattgaaggcctggaagagccgaacggctcctcactgaagaacatcgagaagtacctcaggtctcagtcagaccttaccagcaccactaataacccagccttccagcaaaggctgaggcttggcgccaagcgggctgtgaataatggtagactccttaaagatggcccccagtaccgcgtcaactacggatcactggacggaaaaggagcacctcagtatccatccgcattccccagcagcttgccccccgtgtccttgttgccacatgagaaggaccaaccaagagccgatccgtaa

SEQ ID NO: 467 - DNA, 1194 bp, synthetic construct
  source 1..1194: mol_type = other DNA
aaaaaggggagaaaattgctccatgagaaagccgcccagataaaacgaaggtacgcaaaaccgataggaaggcctaagaacaagctgaagcaacggcttttgtcagtcacgagcgacgagggaagtatgaacgcttttaccggccgaggatcacccggacgggggcagaaaaccaaagtctgtaccacaccatcctctggccatgctgcatccggtaaggattcttcctcacgactggccgtcaccgatccaaccaggcctggagccacaaccaaaatcaccacaacatcaacttatatcagcgcttcaacactgaaagtaaacaaaaaaactaagggcctgattgacggtctcacaaagttctttacccctagtccagacgggcgcagaagtcgcggagagatcattgacttctctaagcactatagaccccgaaagaaggtttcccagaagcagagctgtacctcccatgtactggcaaccgggacaacccagaagttgaagccaccaccatcctctctgccgcccccaacccctatatccggccaatcaccctcctcccagaagagttctacggcaactagtagtccttctcctcagtcctctagttcccagtgtagcgtgccaagtttgagctccttgactacgaatagccaactcaaggccctgtttgatgggctttctcacatttataccactcaggggcagtctaggaagaaggggcatcccagctatgctcccccaaaacggatgagaaggaagaccgagttgtcatccaccgctaagagtaaagcccacttctttggaaagcgggacatcagatcccggttcatcagtcactcctcttcatctagctgggggatggctcgcggttcaattttcaaggctatcgcgcactttaagagaacaactttccttaaaaagcaccgcatgcttggtagactcaaatacaaagtcaccccacagatggggaccccctcaccaggtaagggatccctgacggacgggcggatcaagcctgaccaggatgatgatactgaaataaagattaatattaaacaggaatccgccgacgtgaacgtaattggcaacaaggacgtggtgacagaggaagacttggacgttttcaagcaggctcaggagctctcttgggagaaaatcgaatgtgaatccggcgtggaggattgcggttaa

SEQ ID NO: 468 - DNA, 1278 bp, synthetic construct
  source 1..1278: mol_type = other DNA
gactgcggaagatatccttccgtgatcgagttcggcaaatacgaaattcagacttggtacagttctccatacccacaggaatatgccaggctgcccaaactgtatctttgcgagttctgcctcaaatatatgaagagtaaaaacatcctcttgcggcacagcaagaagtgcggctggtttcacccaccagccaatgaaatttaccgaaggaaggacctttctgtgtttgaggtcgacggcaatatgagcaagatatattgccagaatctgtgcttgctggctaagctcttcctggaccacaagacgctgtactacgatgttgaacccttcctgttctatgtgctgaccaagaacgatgaaaaggggtgtcaccttgtcggctatttttccaaagaaaagctttgtcagcagaagtataacgtctcatgtatcatgataatgcctcagcatcagcgccagggtttcggtaggttcctcattgacttcagctatctcctgagtcgccgagagggacaagctggtagccccgaaaaaccactctccgacctgggccggttgagctacctggcttactggaaatccgtaatactggaatatctgtatcaccaccatgaaagacacatctctattaaagccatctccagagccacaggcatgtgcccacacgatattgctacaactctccaacacctgcacatgattgacaaaagagacggtagatttgtgatcatccggcgcgaaaagctgatcctcagccacatggaaaaactgaagacatgcagccgcgctaacgagttggaccccgactccttgcgctggactccaattctgatctccaatgcagcggtaagcgaagaggagagggaagcagagaaggaggctgaaaggctgatggaacaggcatcctgctgggaaaaagaggaacaagagatcctgagcacacgcgctaactcacgccagtcccctgcgaaggtgcagtcaaaaaataaatacctgcactcacctgagagtaggcctgtgacaggcgagcggggccagctcctggagctctccaaagagtccagtgaggaagaggaggaggaggaggacgaagaagaagaagaagaggaggaagaagaagaggaggatgaagaagaagaggaggaggaagaagaggaagaggaagaagaaaatattcagtccagtccccctagactcactaagcctcagtcagtcgcaatcaagaggaaacggcccttcgtgctgaaaaaaaagcgaggacggaagagaaggaggtaa

SEQ ID NO: 469 - DNA, 2799 bp, synthetic construct
  source 1..2799: mol_type = other DNA
tcttccgtaactacagaaacgatctcagagaccaccgaggtgctgaacgagccatttgataattcagatgaagaaaggcccatgccacagctggaacccacctgcgagatcgaggtcgaggaggacggccggaagccggtgctgcgcaaggctttccagcatcagcccggcaagaagagacaaaccgaggaggaggaagggaaagataatcattgtttcaagaatgccgacccatgcagaaataacatgaatgacgattcttctaatttgaaggaggggtctaaggataatcccgagccactgaaatgcaaacaggtctggccgaagggcacaaagcgcggcctgtcaaagtggcggcagaacaaagagcggaaaaccggttttaaattgaatctgtatacacctccggagactccgatggagcccgacgagcaggtgactgtggaggaacaaaaggaaaccagcgagggtaaaacatccccgtcacctatacgaatcgaggaagaagtgaaagagaccggcgaggctctcttgccacaggaggagaaccgccgcgaggagacttgcgcccccgtgtcacctaacaccagccccggagagaagccagaagatgacttgataaaacctgaggaagaggaggaagaagaagaagaagaagaggaagaagaggaggaagaagagggcgaagaggaggaaggaggcgggaacgtagaaaaagaccctgacggggccaagagccaggagaaagaggagcccgaaatttcaaccgagaaggaggatagcgccaggctggacgaccatgaagaagaagaggaagaggatgaagaaccgagccacaacgaggatcatgacgccgatgacgaggatgattctcacatggaaagcgcggaggtggaaaaggaggagctgcctcgcgagtcattcaaagaagtgctcgaaaatcaggaaacattcctggacctgaatgtgcagcccggacatagtaaccctgaggttctgatggactgtggagtggacctcaccgcaagttgcaactcagaacccaaagagcttgccggcgaccctgaggccgtgcccgaaagcgatgaggagccacccccaggcgagcaggcacaaaaacaggaccaaaaaaactcaaaagaagttgatactgagttcaaagaaggcaatcctgccacaatggaaatagattcagaaactgtccaagccgtccaatccctcactcaggagagttcagaacaggatgacacctttcaggactgtgctgagactcaagaagcctgcagatctctgcaaaactatactagagcagatcagagtccacaaatcgctactacgctcgacgactgccagcagtctgaccatagtagcccagtgtcaagtgtccacagccatcccggccagagcgttcggagcgtgaactcaccgtcagtgcctgccctggaaaattcttacgcccagatcagcccggatcaaagtgccatttcagtaccatcattgcagaatatggagacttcaccaatgatggacgtgccaagtgtgtccgatcactcccagcaggtcgtagatagcgggttctccgacttgggatccattgaatctacgaccgagaattacgagaatccttccagctatgactccaccatgggcgggtctatctgcggaaatgggtcttctcaaaatagctgttcttacagtaacctcaccagcagtagtctcacccagagtagttgcgcagtcacacagcagatgtccaatataagtggtagctgctccatgctgcagcagacgagcatcagcagtccgccgacttgttcagtgaagagccctcagggctgcgtcgtcgaaagacccccctcatcatctcaacagctggctcagtgtagtatggccgctaattttactccacccatgcagctggcggagattcccgagacctccaacgctaacattgggctctacgagagaatggggcagtccgacttcggggcaggccattacccacagccaagcgctacgtttagtctcgccaagctgcagcagcttacaaacaccctcatcgaccacagccttccatattcccactcagcagccgtaacatcctacgctaacagcgcatccctctccacccccctgagcaatacgggcctggtgcagctctcacagtctccgcacagcgtgccagggggcccccaggcacaggccacgatgactccacccccgaatctgactccacctcccatgaacctgcccccgcccctgttgcaacggaacatggccgcctccaatatcggaatctcccactctcagcggctccagacccagatagcatctaagggccatatatctatgcgcaccaaatctgccagtttgtctcccgccgcggccacacatcaatcccagatctatggtcgctctcaaactgtagcaatgcagggcccggcaaggactctcaccatgcaaaggggcatgaacatgagcgtgaatctgatgccagcaccggcttacaatgtgaattctgtgaacatgaacatgaacactcttaatgctatgaacggctatagtatgagccagccaatgatgaacagcggttatcactcaaaccacggctatatgaatcagactcctcaataccctatgcaaatgcagatgggtatgatgggtactcagccctacgcacaacagccaatgcagacccctccccacgggaacatgatgtatactgcccccgggcaccatggctatatgaataccggcatgtccaagcagtccctcaatggtagttacatgaggcggtaa

SEQ ID NO: 470 - DNA, 1392 bp, synthetic construct
  source 1..1392: mol_type = other DNA
atgcgggctgggcccgagccacaagccttggccgggcagaagaggggagcgctgaggctgcttgttcccaggctggtcctgactgtgtctgcaccggcggaggttcggcgacgcgttctcaggccagttttgagctggatggacagagagactcgagccctcgccgactcccacttccggggcctgggtgtggatgtacctggcgtcggtcaggcccctgggagagtggcctttgtttccgaacccggtgcatttagctatgctgactttgttcgagggtttctgctgccaaatctgccttgtgtgttttcctcagccttcacacaaggctggggttccagacggcgatgggtcacccctgctggccggccagatttcgatcacctgctccgaacttacggggacgttgttgtgcctgtggctaattgcggggtgcaggaatataacagcaacccaaaagagcacatgacattgcgggactatatcacctattggaaggaatatattcaggctggctactccagcccaaggggttgtctgtatctgaaagactggcatctgtgcagggatttcccagtggaggacgtgttcacgctgcctgtgtactttagctctgactggctcaacgagttttgggatgcactcgacgtagacgactatcgattcgtgtatgctggccccgcaggatcatggtccccttttcacgccgatatctttagaagcttttcatggtctgtaaatgtgtgtggacgaaagaaatggctgctgttccccccaggccaggaggaagcactgcgcgatcgccatggaaaccttccttacgacgtgaccagcccagcgctttgcgatacacacctccatccccgaaaccaactcgctgggccaccattggagataacccaggaggctggtgagatggtgttcgttccatctggatggcaccatcaagtacacaacctggatgacactatatccatcaatcacaactgggtcaatgggttcaaccttgccaatatgtggagattcctccagcaagaactttgcgctgtgcaggaagaagtttccgagtggcgggactctatgccggactggcatcatcactgccaggtaattatgagatcttgctcagggattaacttcgaggagttttatcactttctgaaagtcattgcagaaaaacgactcttggttctcagagaggcagcagccgaagatggggctggactcgggttcgaacaggcggcattcgatgtgggtagaataaccgaagtgctggcatcactggtagcacacccggatttccagcgcgtggatacctccgccttctccccccagcccaaagaactgctccagcagttgcgagaggccgtagatgcggccgcagccccataa

SEQ ID NO: 471 - DNA, 252 bp, synthetic construct
  source 1..252: mol_type = other DNA
atggcaggagtaggacccggtggatacgcggctgagtttgttccaccccccgaatgtcctgtcttcgagccttcctgggaagagttcaccgaccccctgtctttcatcggaagaatccgaccactcgccgagaagacgggtatctgtaaaattcgacctcccaaagactggcaacccccattcgcgtgtgaggttaagtctttccgcttcacacctagagttcaacggctgaatgagttggaagctatgtaa

SEQ ID NO: 472 - DNA, 999 bp, synthetic construct
  source 1..999: mol_type = other DNA
gagtgctctaagccacgggaggctttcggttttgaacaggccgttagggagtacactctccagtcatttggcgagatggccgacaacttcaagtcagactattttaatatgccagtacacatggttccgactgagctcgtcgagaaagagttctggcgccttgtttcctccatcgaagaagatgtcatcgtcgagtacggtgcagatatctcaagtaaagactttgggtccgggttccctgtaaaagacggccgccggaaaattctccccgaggaagaagagtacgcgctgtctggatggaatctgaacaatatgccggtgctcgagcagtctgttctggcacatataaacgttgacatcagcggcatgaaagtgccttggctgtacgtcggaatgtgtttttcaagtttctgctggcacattgaggaccattggagttacagtatcaattatctccactggggcgagccaaagacctggtatggggttccaagccacgcagctgaacagctcgaagaagtcatgcgcgaattggccccggagctgttcgagtcacagccagacctcctgcaccaactcgtcaccatcatgaaccccaacgttctgatggaacatggggttcccgtctaccggaccaaccagtgcgccggcgagttcgtggttaccttcccccgagcctaccactccggcttcaaccagggttacaacttcgccgaggccgtgaacttttgcaccgccgattggctccccatcgggcgccagtgtgtgaaccactacagaaggttgcggcgacactgcgtgtttagtcacgaggagctcatttttaagatggctgccgatcccgaatgcttggacgtcggtcttgccgctatggtctgcaaggaactcacactcatgaccgaggaggaaaccaggctgagagaatcagttgtgcagatgggtgtattgatgtcagaagaagaagtttttgagctggtgccggatgacgagagacagtaa

SEQ ID NO: 473 - DNA, 1299 bp, synthetic construct
  source 1..1299: mol_type = other DNA
ctttacggggtgaaggttagggcccagagctacgacacttgggtgtcacgagtcaccgaagctctgtcagctaattttaatcacaaaaaagatctgatagagctgagagtcatgctggaagatgcagaagaccggaagtatcctgagaatgacctgttcagaaaactccgagacgccgtcaaggaggccgagacttgcgccagcgtggctcagctccttctgagcaaaaagcagaagcaccgccagagccctgactccgggaggaccaggactaagctgaccgtggaggagctgaaggctttcgtgcagcaacttttttccctgccgtgtgtcatctcccaggcccgacaagttaaaaacttgctggatgatgtggaggagtttcatgaacgggcccaggaggcaatgatggatgagaccccagacagcagcaaattgcagatgttgattgatatgggaagcagcctttacgtggaactgcctgaacttccccgcctgaagcaggagctgcagcaagctagatggttggatgaggttcgactcaccctgagcgatcctcaacaagttaccctggatgtcatgaagaaactgatcgacagtggagtgggactggcaccccaccacgcagttgagaaagctatggccgagttgcaggaacttttgaccgtcagcgagcggtgggaggaaaaggctaaagtttgcctgcaggcgaggccccgacacagtgtggctagcctggagagcattgtcaatgaggcgaagaacataccagcatttctgccaaatgtgttgagtttgaaggaggccctccagaaggcacgggaatggactgctaaggttgaggcaatccagagcggcagtaattacgcctacctggagcaactggaaagccttagtgcaaaagggcgccctatcccagtccggctggaagccttgcctcaggtggaatcacaagttgcagctgctagagcatggcgcgagaggaccggacgaacttttctgaagaagaactcatcacacacactcctgcaggtcttgtcacccagaaccgacataggcgtgtatgggagcggcaagaaccgccgcaagaaagtgaaagagctgatcgagaaagagaaggaaaaagacctcgacctggagccactgagtgatcttgaggaaggtctggaggaaactagggacaccgccatggtcgttgcggtcttcaaagagcgagaacagaaagaaatcgaggctatgcatagcctgcgcgccgccaatttggccaagatgaccatggtggacaggattgaggagtaa

SEQ ID NO: 474 - DNA, 1167 bp, synthetic construct
  source 1..1167: mol_type = other DNA
cggagaccgcgcctcgagactattctgagtctcctggtgtctctgcaaaaactgcccgtgcggcttccagaaggcgaggcactgcagtgtctgaccgaacgggcaatgagctggcaagatcgggcgaggcaagccctcgctacggatgaactgtctagcgctctggccaagctgagcgtcttgtctcagagaatggtcgaacaggcagcacgcgagaagacagaaaaaattatttcagcagagttgcagaaggcagcagccaaccctgatcttcagggacacttgccctccttccagcagtccgcgttcaacagagtggtttcaagcgtgtctagctcaccgagacagacgatggattatgatgacgaggaaacagacagcgacgaagacatcagagagacttatgggtatgatatgaaagacacagcatcagtcaaatcaagctcctcactggaaccaaatctgttctgtgacgaggaaatacccatcaagtctgaagaagtcgttacccatatgtggaccgccccctccttctgtgctgaacacgcatacagctccgcatccaaatcctgttcccagggtagctctactccccgaaagcaacctcgcaaatcccctctggttcctagaagcttggaaccacccgtgctcgaactgtccccaggggctaaagctcagctcgaggaacttatgatggtaggtgatttgctcgaagtcagcctggatgagactcagcacatctggagaattcttcaagctacgcaccctccgagcgaagatcggtttttgcatatcatggaggacgattctatggaggagaaaccactcaaagtgaaaggcaaggactcatctgagaagaagcggaaacggaagctggaaaaggtggagcagctttttggggagggaaaacagaagtccaaggagctgaagaagatggataagcctcgaaagaagaagttgaaactcggcgccgataagtctaaagagctgaacaagttggccaagaaattggcgaaggaagaagaacgcaaaaaaaagaaagagaaagccgcagctgccaaggttgaactggtcaaggaaagtacagagaagaagagggaaaagaaggtgttggacataccgagcaaatatgactggagcggtgcagaggagagtgatgatgagtaa

SEQ ID NO: 475 - DNA, 3087 bp, synthetic construct
  source 1..3087: mol_type = other DNA
atgaactcacctaatgagtcagacgggatgagtggtagagagccctctctcgagattctgcccaggacatccctgcacagcatcccagtcacggtggaagtgaagcctgtgttgccacgagcaatgccttcctctatgggcggaggcgggggcggttccccatcccccgtggagctgagaggagctctcgttggctctgtggaccctactctgagagagcaacaactgcagcaggaactgctggcgctgaagcagcagcagcagctgcaaaagcagctgctctttgcggagtttcaaaaacagcatgaccacctcactagacagcatgaggttcagctgcagaaacatcttaagcaacagcaggagatgctggcggccaagcagcaacaggagatgctggcagcaaaaaggcagcaagaactggagcagcagagacagcgagagcaacagcgccaggaagagttggagaaacagcgcctggaacaacagctgctcatcctcagaaataaagagaaatcaaaggaaagcgcaatcgcatccaccgaggtcaagctgagactgcaggaattcctcctgagtaaaagtaaggagcccactcccggtggcttgaaccattctcttccccagcaccccaagtgttggggcgcccaccatgcctcattggaccagtctagtccaccgcagtctggcccgcctggaacaccgccttcttacaagctccctcttccagggccttacgacagcagggatgatttccccttgaggaagaccgcgtccgaacccaatctgaaggttcggtccagacttaagcagaaagtggcagagcggcgctcttcacccctgctgcggcgcaaggacggaacagtgataagtacatttaagaaacgggcggtcgagatcaccggcgcgggcccgggggcttcatcagtatgcaattcagcccctggcagtggaccctcaagtccgaacagtagtcacagcacgatagcagagaacggatttactggtagtgtcccaaatatccccaccgaaatgcttccacagcacagagccctcccactcgattccagcccaaatcaattttcactctatacaagtccatccctccccaacataagcttgggccttcaggcaacagtgaccgtgactaattcccacttgaccgccagtcctaaactgtccacccaacaggaggctgaacgccaggccctccagtcactgcggcagggaggaacactgactggaaaatttatgagtacatcctctatcccagggtgtctgctgggagtcgcactcgaaggcgatggatcacctcacgggcacgcctccctgctgcagcacgtcctgttgctggagcaagcccggcagcagtccacactcatagccgtgccgctccatggacagtctcccctggtgactggggaaagggtggctacttcaatgagaaccgtagggaaactgccgcggcataggcctctgagccgcactcagagttcccccctgccgcagtcccctcaggccctgcagcagcttgtgatgcagcagcagcaccagcaatttctcgagaagcagaaacagcagcagctgcagctgggaaagattcttaccaagacaggtgaacttccccgccagccaacgactcatccagaagaaaccgaagaagagctcaccgagcaacaagaagtcctccttggtgagggggcgctcacgatgcctagagaggggtccaccgagtctgaatcaacccaggaggaccttgaggaggaagatgaagaggacgatggagaagaggaagaggattgtatacaggtgaaggacgaagaaggggagagcggcgcggaggaagggccagaccttgaggagccaggagctggctataaaaaactgttctccgacgctcagccactgcagccacttcaggtttatcaggccccgctgtccttggccactgtccctcatcaggccctcgggcgcacccaaagttcccccgccgccccgggaggaatgaaaagccctccggatcagcccgtgaaacaccttttcaccacaggcgtggtctatgacaccttcatgttgaagcatcagtgtatgtgtggcaatacccatgttcatccagagcatgctggtaggatccagtctatctggtccaggctccaggagactgggctgctgtccaaatgtgagcgcatccgcggtcgaaaggctacccttgacgagattcaaaccgtgcattcagagtaccatacgctgctttacggcacaagtccactgaatcgccagaaactcgattccaagaagttgctggggcctatcagccagaagatgtacgctgtcttgccctgtgggggcatcggggtcgactctgatacagtctggaatgaaatgcactctagtagcgctgtgaggatggcagtgggctgtctgctggaactggctttcaaggtggcagccggagagttgaaaaacggcttcgctattatccgaccgcccgggcatcacgcagaggaatctaccgccatgggattctgcttcttcaattccgtcgccatcacggccaaactcctccagcaaaaacttaacgtcggcaaagttctcattgtggactgggacattcaccacgggaacggcacgcagcaggccttctataatgacccctccgtgctctacattagtctgcaccggtacgataatggtaacttcttccctggatctggagcccctgaggaggttgggggaggccctggcgtgggctacaacgttaatgttgcctggacagggggagtggacccgcctatcggcgatgtggagtatctgacggcttttcgcacggtggtgatgccaatcgcgcatgaatttagcccagacgtcgtcctcgtgtccgccggttttgatgcagtagagggacatctgtcaccattgggaggctattccgtgaccgcacgatgcttcggacatctcacccgacagctcatgactttggctggcggtagagttgtgttggctctggaaggcggacacgaccttaccgctatctgcgatgcaagtgaggcgtgtgtgagtgctctcctttctgtcgaactccagtaa

SEQ ID NO: 476 - DNA, 1128 bp, synthetic construct
  source 1..1128: mol_type = other DNA
atgtcccagccaaagaagaggaagttggagagcggcggcggtggggaaggcggagaggggaccgaggaagaggacggcgccgaacgggaggcggccctcgagcgccctcggcggacaaagcgcgaaagagaccaactgtattacgagtgttattccgacgtgagtgtgcacgaggagatgattgccgacagggttagaaccgatgcataccggctggggatcctgcggaattgggcggcactgagaggtaaaacagtgcttgatgttggggcggggactggtatcttgagcatattttgcgctcaagccggcgccagacgggtgtatgccgtggaggccagcgccatttggcagcaggcaagggaagtggtccgctttaatgggttggaagacagagtgcacgtcctccccggccctgtggagaccgtggaactgccagaacaggtcgacgccatcgttagcgaatggatgggctacggtcttctccacgaaagcatgctctcatcagtgctgcacgcgagaacaaagtggctgaaagaaggtggcctcctcctgccagcctctgctgagcttttcatcgcccccatctccgaccaaatgctcgagtggcgactcggcttttggtcccaggtcaaacagcattatggagttgacatgtcctgcttggaaggatttgccaccagatgccttatgggtcactccgagatcgtggttcaggggctctccggcgaagatgtgctggcccgaccacagaggtttgcacagctggaactgagccgggctggcctggagcaggaacttgaagccggggtgggcggaagatttcggtgctcatgttatgggtcagcccccatgcacgggtttgcaatctggtttcaggtgacatttccagggggagagtccgaaaagccactggtgctgtccacctctcctttccatcccgccactcattggaaacaggctctgctttacctgaacgagcccgtgcaagttgagcaggacactgatgtttcaggggaaatcacgctgctgccaagtcgcgacaatcctagacgcttgagagtgctgctcaggtacaaggttggggatcaggaagaaaagaccaaagactttgctatggaagactaa

SEQ ID NO: 477 - DNA, 2499 bp, synthetic construct
  source 1..2499: mol_type = other DNA
atgacttctaccgggcaggacagcactaccacccggcagcggaggagcagacagaacccccagtccccacctcaggactctagcgtcacttcaaagcggaacatcaagaaaggggctgtgccacgaagcattcccaatcttgcagaggtgaaaaagaaagggaagatgaagaagcttgggcaggcgatggaagaggatcttattgtcggtctgcagggcatggatcttaacttggaagctgaggcacttgcaggcactgggctggtgttggatgagcagctgaacgaattccattgtctgtgggatgactcctttcctgaaggacccgaacgcctgcacgctatcaaggagcagctgattcaggaaggccttctggatagatgcgtctcttttcaggctaggttcgctgagaaggaggagcttatgctggtccattctctggagtacatcgacctcatggagaccactcagtatatgaatgagggcgaacttagggtgctcgcggatacatacgactcagtgtaccttcatcctaattcctacagctgcgcctgccttgccagcggtagtgttctccgactcgtggacgccgtgcttggagctgaaattaggaatggtatggccattatccggcctcccggtcatcatgcccagcactccctgatggatggctattgtatgtttaaccacgtggcggtggccgctaggtacgctcaacaaaagcaccggatcagacgggtcttgatcgttgattgggatgtgcaccacggacagggaacacagtttaccttcgatcaggatcccagcgtcctctacttcagcatccaccgctatgagcagggccgcttctggccccacctcaaggcatccaactggagtaccacagggtttgggcaggggcagggatacactattaacgtaccatggaaccaagtgggcatgcgagacgctgattatatcgctgcttttctccacgtgcttctgccagtggcactggagtttcagccacaactggttctcgtggccgcgggatttgacgccctccagggcgaccctaaaggggagatggcagccactccagctggtttcgctcagcttacacatctcctcatgggcttggcgggaggtaaactgattctgagcttggagggcggttacaatctgcgggccttggctgaaggagtgagtgcctccctccacacactcttgggtgacccttgtccaatgttggagtcacctggggcgccttgtcgctccgctcaagccagcgtctcctgtgcactggaagcactggaacccttttgggaagtgttggtcaggagcaccgagaccgtggagcgcgataacatggaggaggataatgtcgaggagtccgaagaggagggaccctgggagcccccggttctgcctattctcacttggcccgtcctccagtcacgcacagggctggtctatgaccagaatatgatgaatcattgtaatttgtgggactcccatcaccccgaagttcctcagcggattctgaggatcatgtgcaggctcgaggaactgggccttgccggaagatgcctgacgctgacccctagaccagcaaccgaagccgagctgctgacttgccactcagcggaatatgtcgggcacctgagggctacggagaagatgaagacccgagagcttcacagggagagctctaactttgattcaatctacatttgtccgagcactttcgcatgcgcgcagcttgctacgggagcagcttgtagactggtggaggcagtactgagtggagaggtcctgaacggtgccgccgtggtaaggcctccaggacaccacgcagaacaggacgcggcgtgcgggttctgctttttcaatagcgtcgccgtcgcagcccgccacgctcagacaatatcaggtcatgctctgcgaatcctcatcgttgattgggatgttcatcacgggaacgggacccagcacatgttcgaagacgatccaagcgttctgtacgtttccctgcaccgctacgatcatgggacctttttccccatgggagacgagggcgccagttctcagataggacgggcagccggcaccgggtttactgtcaatgtagcatggaatggacccagaatgggggatgctgactacttggccgcatggcacaggctggtgcttcctatcgcttacgaatttaaccccgaattggtgttggtgagtgccggctttgacgctgcaaggggcgacccattgggcgggtgccaggtgtcaccagagggctatgcccatctgacacacctgctgatggggctcgcaagtggacgcatcattcttattttggaaggcggctataacttgacgagcatctccgagtcaatggcggcatgtacccggtcactcctcggcgacccccctccacttctgacactccctcgccctccgctgagtggtgccctggccagtataacagagaccatccaggtccacagacggtattggcggtaa

SEQ ID NO: 478 - DNA, 1155 bp, synthetic construct
  source 1..1155: mol_type = other DNA
aggtccctcagggtgatgaaggtggaggacagagaaggcccgtcttcatcaaagctggtcactaagaaagccccccaacccgcaaaaccgcgcctggctgagcggatgacgacccgcgaaaagaaggtgctggaagccggcatgggaaaggtaacgagcgcttctttcggcgaagagtccacccccggccagaccaacagcgaaaccgccgtcgttgcactcactcaggatcagccatcagaggccgccactggcggagctactctggcccaaacaatcagcgaagctgctatcggaggtgccatgctggggcagaccacctctgaggaagctgttggcggagccacacctgaccagaccacttcagaggagaccgtgggcggagccatcctggatcaaacaaccagcgaggatgccgtaggaggagccactcttggacagaccactagtgaggaggcagttggcggggcaacactggctcagacaacgtcagaagcagcaatggagggcgcgacccttgaccaaactaccagtgaggaagccccaggagggactgagctcatccagactcctctggcttcttctaccgatcaccagacaccccccacatcccctgtgcagggcaccaccccacagatctctcccagcacattgatcgggtctttgcgcacattggagctcgggtctgagtcccagggtgcctctgaaagtcaggcgccaggcgaagaaaacttgttgggggaggccgcggggggtcaggatatggcagattccatgttgatgcagggctctagaggccttaccgatcaggccattttttatgccgtgacccccctcccatggtgtcctcacctcgtggcggtgtgcccaattcccgccgccgggttggacgtgacacagccctgtggcgactgcggtaccatacaagaaaactgggtgtgtttgtcatgttaccaagtatattgcggacgatacattaatggccatatgttgcaacaccacgggaattcaggacatccccttgtgctctcctacatagacctctccgcctggtgttactactgtcaggcctacgtccaccaccaggctctcctggatgtcaagaacatagcccatcagaataaattcggtgaagacatgccacacccccattaa

SEQ ID NO: 479 - DNA, 1290 bp, synthetic construct
  source 1..1290: mol_type = other DNA
atgagcggaggagtgtatgggggggacgaggttggagctctggtgttcgatatcggttcctacacagttcgagccggctacgccggggaggactgtccgaaggtcgactttccgactgcaatcggaatggtcgtggagcgggacgatgggagcaccctgatggaaatcgatggggacaaagggaagcaaggaggcccaacctattacattgacacaaatgccctgagagttcctcgcgagaacatggaagcaataagtcctctgaaaaacggaatggttgaggactgggatagtttccaagcaatcctcgaccacacctataaaatgcatgtgaaatccgaggcctccctgcaccccgtgctcatgtcagaagccccatggaacacccgggcaaagcgcgaaaaactcaccgaactgatgtttgaacactataacatccccgcattttttctttgtaaaacagcagtcttgacagcattcgccaacggccgaagtacggggctgatccttgatagtggcgcaacccacaccaccgctatccctgttcatgacggatatgtccttcagcagggtatcgtgaagagcccccttgcgggggacttcattacgatgcagtgccgggaattgttccaggaaatgaacatagagctggtgcccccctacatgattgcctctaaagaggccgtgagggaaggatcaccagcaaactggaaacggaaggaaaaattgcctcaggtgacccgctcatggcataattacatgtgtaactgcgtcatccaggacttccaggccagcgtgctgcaggtctctgattcaacctacgacgagcaggtggctgcccagatgccaactgttcattacgagtttcctaatggttataattgtgattttggcgccgagcggctcaagatcccggagggacttttcgacccgtcaaacgtgaaggggttgtctgggaacaccatgctcggcgtgagtcatgtcgtcacaacaagcgtgggtatgtgtgacatcgacatcagaccgggtttgtacgggagcgtaatagtagccggaggcaacaccctgatccagtcatttactgatcgactgaatcgcgagctttcacaaaagacacctccctctatgaggctcaagttgattgccaataacacaacggtggagaggagattctcatcttggataggggggagcatcctggcaagcttgggaactttccaacagatgtggatctctaaacaggagtatgaggagggcgggaaacaatgcgttgaacgcaagtgtccctaa

SEQ ID NO: 480 - DNA, 1221 bp, synthetic construct
  source 1..1221: mol_type = other DNA
atgactaccccggcaaacgcccagaatgcgagtaaaacttgggaactctctctctacgagctgcaccgcactcctcaagaagccatcatggatggaaccgaaattgctgttagtcctcgatcattgcacagcgagctcatgtgcccaatctgtctcgacatgctgaagaatactatgacaactaaggagtgcctgcatagattttgttccgactgcatcgtgaccgcactcagaagcggaaataaggagtgcccgacctgtaggaagaagctggtgagcaagcggagtcttaggcctgatcctaactttgacgctctgatatcaaaaatttaccccagccgcgaagaatatgaagcccaccaggaccgcgtcttgatcagactgtcaaggctgcataatcagcaagccctgtcctctagcattgaggaagggctccggatgcaggccatgcatagggcacagagggttagacgcccgattccggggtcagatcagaccacaaccatgagtggaggcgaaggtgagcctggggagggtgaaggtgacggggaggacgtgagcagcgattccgcacccgattcagcacctgggcccgcgccgaaaaggccaaggggaggcggcgccggtggctcaagtgtgggaactggaggagggggcacggggggcgtaggaggaggtgccggatctgaggactctggagatagggggggcaccttgggcggcggaactctcggccccccttcccccccaggggccccgtctcctcctgagcctgggggcgagattgagctggtgtttagaccccatccccttcttgtcgaaaagggcgagtattgtcaaactaggtacgttaagactacaggaaacgctacagtcgaccatctgagtaaataccttgccctgcgcattgccctggagaggcggcagcagcaggaggccggcgaacccgggggacccggcggaggggcttctgatacggggggacctgatggatgcggaggtgaaggagggggcgccggggggggagacggacctgaggaacccgcactgccctcattggaaggcgtgtccgagaagcagtacacgatttatattgcgccaggtggtggcgcgttcaccacattgaacggcagccttaccctcgagctggtaaatgaaaagttctggaaagtgtccagacctctggagttgtgttacgcacccactaaggacccaaagtaa

SEQ ID NO: 481 - DNA, 3864 bp, synthetic construct
  source 1..3864: mol_type = other DNA
agagtggtgtgctttctgtgtgcctctagcggacacgttgaatttgtgtactgtcaggtgtgctgtgaaccattccataaattttgcctcgaggaaaacgagagacctctcgaagatcagctggagaactggtgctgtaggcgatgtaagttctgccacgtttgcggaaggcagcaccaggctacgaagcaactgctggagtgcaacaagtgtagaaactcctaccatccagaatgtcttggccctaattaccccactaagcccactaagaaaaaaaaagtgtggatttgtactaagtgcgtccgctgcaagagttgcggcagcactacccccggtaaggggtgggatgctcagtggagccacgacttctccctttgccatgattgtgccaaactgttcgccaaagggaacttctgcccactctgcgataaatgttatgacgacgatgattacgagtccaagatgatgcagtgcggcaaatgcgaccgctgggttcactccaaatgcgagaatttgagtgacgagatgtatgagattctgtccaatctccccgagagcgttgcatacacatgtgtgaactgtacagagagacatcctgcagagtggcggctcgccctcgagaaggagctccaaatttctcttaaacaggtgctgacagccctgcttaactctagaaccacatctcacctcttgcggtaccggcaagcagcaaagccccccgaccttaatcccgaaactgaagagagcatccctagccggtcttccccagagggccccgaccctcctgtgctcaccgaagtgagtaagcaggacgatcagcagccgttggacctcgagggagtcaagaggaagatggatcaggggaattacactagcgtcctcgagttctccgacgacatcgtgaagatcatccaggccgccattaacagtgatggcggccagccagaaattaaaaaggctaactctatggtgaaatccttctttatccggcagatggagcgggtcttcccgtggttctctgtgaaaaagagtagattctgggagcctaacaaggtcagtagcaatagcgggatgttgcccaacgccgtgctgccgccctcattggaccataattatgcccaatggcaggaacgagaggaaaacagtcacactgagcagccaccactcatgaaaaaaatcattccagctccaaagcccaaaggccctggtgagccagattctcctacaccgttgcaccccccgactcctccgatactgtctacagacaggtctagagaggacagtcctgagctgaatcctccgccaggaatcgaagataatcggcagtgtgctctttgcctcacctacggcgacgacagcgcaaacgatgcaggtcggctgttgtacataggccagaatgaatggacccatgtgaattgcgccctctggagcgctgaagtcttcgaagatgatgacgggagcctgaagaatgtgcacatggcagtcattaggggcaagcagctgcggtgcgagttctgtcaaaagcccggggcgacagtcggctgctgcctcacaagttgcacctcaaactatcactttatgtgttcaagggcgaaaaactgtgtcttccttgatgataagaaagtctattgtcagaggcaccgagacctcattaaaggggaggtggtgcccgagaacgggttcgaggtatttagacgagtttttgtagatttcgaaggcatcagtctgaggcggaagtttctgaacggcctggagccagagaatatacatatgatgatcggaagcatgactatagattgcctcggcatcctgaatgatctttctgactgtgaggataaactttttccaattggttaccagtgcagtcgggtttactggtcaacaacggacgcgcgcaaacggtgcgtgtatacatgtaagatcgtagagtgccgacctcccgtggtcgagccggatatcaatagtaccgttgaacacgacgaaaatcggactatcgcgcactccccaacatcattcactgagagcagctctaaagagagccaaaacacggccgagatcatatctcctccttctcctgaccgcccacctcattcccagacatccggctcatgttattaccacgtcatctccaaggttcctagaattcggactcccagctatagccctacgcaacgctcacctggctgtcggccactcccatctgccgggagtcctactcccacaactcacgagattgttaccgtaggggaccccctcctgtccagtggtctgagatcaataggctcccgccgccatagcacatctagtctgtccccgcagcgaagcaagcttcgcatcatgagtcctatgaggactggaaatacgtattcccggaataacgtaagctcagtgagtaccacgggaaccgcaaccgatttggagtcaagcgcaaaggtggtggaccacgttctgggcccactgaatagttctacatctcttgggcagaacacgtctacatcttccaatcttcagaggacagtggtgactgtgggcaataaaaactctcatctggatgggtctagttcctctgaaatgaagcagtcatccgccagcgatctcgtctctaagtctagctcattgaaaggagagaaaaccaaagtgctgagtagcaaatcctctgaaggctcagctcacaacgtggcctatcctggcatccccaaactggccccacaagtgcacaacactacctcccgcgagcttaatgtgtctaaaatcggatcttttgctgagccctctagcgtgtccttcagctctaaagaggccctttcattcccccacctccacttgaggggtcagcggaatgatcgagatcaacatactgattctacccagagcgccaactcttctccggatgaggacactgaagtcaagacgctgaagctgagtggaatgtccaatcggtccagtattatcaatgagcacatgggctcaagcagtagggaccgcaggcagaagggcaagaagagctgcaaagagacttttaaagagaagcattcaagcaaatccttcctggaaccaggccaggtgactacaggcgaagagggcaacctgaaacctgaatttatggatgaagtactcaccccagaatatatgggacagcgcccttgcaataacgtgagcagtgataagattggcgataaggggctgtccatgcctggggttccaaaggctccgccaatgcaggtcgagggatccgctaaagaactgcaggctcccagaaagcggacagtgaaggtgacgttgaccccactgaaaatggagaacgagtctcagtctaagaacgccctgaaagagagttcacctgccagtccactccagattgagagcacgagccctaccgagcctatcagtgcttcagagaatccaggcgacgggccagtcgcccagcccagtcccaacaacacttcttgccaggattcccagtctaataattaccagaacctgccggtgcaggaccggaacctgatgctcccagatgggcccaaacctcaggaggacgggtcttttaagagaagatacccaagacggtccgccagggcgagatcaaatatgttcttcggactgacacctctgtacggtgtgcggagttatggggaagaagacatcccattctacagcagctccactgggaagaaacgggggaagcgcagcgcggaaggccaggtggatggcgccgacgacctgagtacctcagacgaagatgatctctactactataattttaccaggactgtaatttcatctggtggcgaagagagactggcttctcataatctgtttcgcgaggaggaacagtgtgacctgccaaaaatctctcagctgtaa

SEQ ID NO: 482 - DNA, 3162 bp, synthetic construct
  source 1..3162: mol_type = other DNA
ggtgtggatgatgggactgagtccgacacctcagttacagcgaccaccagaaagtccagccagatacccaagaggaacggaaaagaaaatggaactgaaaatctgaagatcgaccggcctgaagacgctggggagaaggaacacgtgacgaaaagttccgtgggtcataagaacgagcctaaaatggataactgccacagcgtttcccgggtgaagacacagggtcaggattctctcgaggcacagctgtccagccttgagagctctcgcagagtgcatacctctacaccctcagacaagaaccttctggacacatataataccgaacttctgaaaagcgactctgacaacaataactccgacgactgcggaaacatcctgccatccgatattatggatttcgtcctcaaaaataccccatccatgcaggcgctgggtgaatctcctgagagctctagctctgagctcctcaacttgggcgagggactgggcctggattccaacagggagaaagacatggggttgttcgaagtcttcagtcaacagctgcccactaccgagccagtcgactccagtgtcagcagcagtatctctgctgaagaacaattcgagcttccactggagctcccctctgacttgtccgtgctgactacgcgctctccaacagtgccttcccagaacccctcaagactcgcagttatatccgactcaggagagaagagggtgacaattaccgagaaatcagtggcgtctagtgaaagtgacccagcccttctgagtccaggagtggaccctacaccagagggccatatgacccctgatcacttcattcaaggtcacatggacgctgatcacatctcatctcctccgtgcggctctgtggaacaaggccatgggaacaaccaagacctcacccggaactcaagtaccccaggactgcaggtaccagtcagtcccacagtacccattcagaatcagaagtatgtgcctaactccaccgactcaccaggcccgtcacagatttccaatgctgccgttcaaaccacccctcctcaccttaagcctgccacggaaaagctgatcgttgtgaatcagaacatgcagcccctctacgtgctgcaaacattgccaaatggggttacccaaaagatacaactgaccagctccgtgtccagcacaccatcagtgatggaaactaacacaagcgtcttgggacctatgggggggggactgaccctgacaacgggcctcaatccctcccttcctaccagccagagtctgtttccctccgcgtctaaaggacttttgcctatgtcccatcatcagcatctgcacagcttcccagctgcaactcaatcatctttcccccctaacattagtaaccctcctagcggcctgttgatcggagtgcagccacctccagatcctcaactgttggtctccgagtccagtcaaagaactgacctgtccaccacagtggctactccttcctctgggctcaaaaaacggcctatcagtagattgcagacacgcaagaacaagaagctcgctccctcatctacacctagcaacatagcgcctagtgatgtggtgagcaacatgacgctcataaactttactccctctcagctgcctaatcaccctagcctcctcgacctcgggtctctcaacacaagttctcaccggacagtgccgaacataatcaagcgctctaagagtagtattatgtacttcgaacccgctcccttgttgcctcagagtgtaggcggtactgctgctacggcggctggaacaagtaccatttctcaggacacttctcacctcacaagcgggtccgtgtcaggtcttgccagcagtagcagcgtgctgaacgtcgtgagcatgcaaactacaactacccctaccagcagtgcgtccgtgcctggccacgttacactgacaaacccacgcttgctcggcacgccagatataggctctatcagcaatttgctcatcaaggctagtcagcagtccctgggcattcaggaccagccagtggcactgcctccctcttcaggaatgtttcctcagctgggaacaagtcagaccccctcaaccgcagctatcaccgccgctagctctatctgtgtgctgccaagcacccagactacagggattacagccgcgagtccaagcggagaagccgacgagcactaccagcttcagcatgtcaaccagctcctggcttcaaagaccgggatccatagctctcagagggatctcgattctgcctctgggccccaggtgtccaattttacacagactgtggacgcacctaatagtatgggactcgaacagaacaaagctctgagttccgcggttcaggcctccccaacgagtcccggcggaagtccttctagcccgagttccggacagcggtccgcctccccaagcgttccgggcccaacaaagcccaagcccaagacaaaaagatttcagcttcccctcgataaaggcaacggcaagaagcacaaggtcagtcacttgagaacctctagttctgaagcccatatccctgaccaggagacaacatcactgaccagtggcacaggaacccctggggctgaggcggagcagcaggatactgccagcgtcgagcagagctctcagaaagaatgtgggcagcctgccggccaggtcgccgtgctgcctgaagtgcaggtgacgcaaaaccctgcgaatgaacaagagagtgctgaaccgaagactgttgaggaggaagagtcaaacttcagctctccgctgatgctgtggcttcagcaagagcaaaaaagaaaggagagcataacggaaaaaaaaccaaaaaaggggctggtgttcgagattagttcagatgatggattccagatctgcgccgaaagtattgaagacgcatggaaaagcctgacagacaaggttcaagaggcccgatccaatgcaaggctgaagcagcttagcttcgccggagtgaatgggctgcgaatgttggggattctgcacgacgccgtggtttttctgattgaacagctgagtggagccaagcattgccgaaactacaagttcaggttccacaaaccagaggaagcaaacgagccccccctgaacccccacggctccgcacgggccgaagtgcacctgcgctaa

SEQ ID NO: 483 - DNA, 651 bp, synthetic construct
  source 1..651: mol_type = other DNA
aacgagccacctctcaatccccacggcagcgctagggcggaggtgcaccttcgcaagtctgctttcgatatgtttaacttcctggccagtaaacaccggcaacccccggaatacaaccccaatgacgaagaggaagaagaggtccagctgaagagtgcgcgaagagctaccagcatggatttgccgatgccgatgcgctttcgacacctgaagaagactagtaaagaagcagtcggagtgtaccggagcccaattcacggcagggggctgttttgtaaacggaacatagatgccggcgaaatggttattgagtacgcagggaatgtgatcagaagcattcaaacagacaagcgggaaaagtactacgattccaagggcatcggatgttacatgtttaggattgatgattccgaggtagtagatgctaccatgcacggcaacgccgcaaggttcatcaatcacagttgcgagccaaattgttattctcgcgtaataaatatcgacggtcagaagcacatcgtgatttttgctatgagaaagatttatcggggcgaggaactcacctatgactacaaatttcctattgaggacgcctcaaacaagctgccttgcaactgtggcgccaaaaaatgtagaaagtttctgaattaa

SEQ ID NO: 484 - DNA, 3120 bp, synthetic construct
  source 1..3120: mol_type = other DNA
atggaaaactcccatcctccacatcatcaccatcagcagcccccaccacagccaggtcctagtggggagaggcgcaaccaccactggagatcctacaagctgatgatcgaccctgctctgaagaaggggcatcataaactctacaggtacgacggtcagcattttagccttgcaatgtcttccaaccgccctgtagagatagtggaggatccgagggttgtcggaatttggaccaaaaacaaagagctcgaactctctgtacctaaattcaaaatcgatgagttttatgtggggccggtgccccccaaacaggtcacattcgctaagttgaatgataacatacgagaaaacttcctgagggatatgtgtaagaagtacggggaagttgaggaagtcgagattctctacaaccctaagaccaagaagcacctgggcatcgcaaaagtcgtctttgccactgtgcggggagcgaaagacgccgtccagcacctccactctaccagtgttatgggcaacatcatacacgtggaactggatacgaaaggggaaactaggatgagattttacgagctgttggtaaccggccggtatacaccacagacccttcccgtgggggagctggacgccgtctctccaattgtcaacgaaactcttcagttgagcgatgcgctgaagaggttgaaggacggcggcctgtccgctgggtgcggatcaggatcctctagcgtaactcctaattcaggcggaacacccttctcccaagatactgcatattcaagctgtcggctggacacccccaacagctacggccagggcactcctctgacacccagattgggcaccccattctctcaggactcttcatatagctccagacagccgacacctagttacctgtttagccaggacccggccgtgacctttaaggccaggcgccatgagagtaagtttactgacgcctataacaggcggcatgagcaccactacgtgcacaacagtccggccgtgaccgccgttgccggcgcgactgccgctttccgaggtagctccgatcttcccttcggcgccgttggcgggaccggcggcagttcaggaccgccatttaaagcacagccccaggattccgctactttcgctcataccccaccccctgcacaggcaactcctgcccctggcttcaaaagtgccttctccccgtaccagacacccgttgcccactttcccccacccccagaggaaccaacggctactgcagcctttggggcaagggattccggcgaattccgcagagcccccgcaccacccccactgccccccgccgaacctctcgccaaagagaagcctggcacacctccgggaccacctccccctgacactaattccatggagctgggaggccgaccaactttcggatggtctcctgagccatgtgacagccctggaacaccgaccttggaatccagcccagccgggcccgaaaaacctcatgacagcctggacagtagaattgagatgcttctcaaagaacagaggaccaagctcctgttcctccgagagcccgatagtgacacagagctccaaatggaaggatctcccattagcagtagctcaagccaactgtccccgctggctccttttggaactaacagccagccaggcttcagagggcctacccctccatcttctagacctagcagtaccgggctcgaagatataagccccacacctctgcctgattctgatgaggacgaggagttggacctgggtcttgggccgaggccgcctccagaaccggggcctcccgatccagccggcctgctgtctcagacggcagaggtcgcccttgatctggtgggcgatcgaaccccaacaagcgagaaaatggatgagggccagcagtcaagcggggaagacatggaaatctctgacgacgaaatgccctctgcccctattactagtgctgattgtcccaaacccatggtcgtaacgcccggggctgcagcagtagccgccccgtccgtgctcgctcccacccttccccttccacctccccctggttttccacctctcccgccccctccacctccccccccaccacaacccggctttccaatgccgccccctcttccaccacccccaccaccaccaccccctgctcaccccgcagtcactgtgcccccgccaccactgcccgctccacctggtgtccccccacccccaatcctgccaccacttccccccttcccacccggactttttccggtcatgcaggtggacatgagccatgtgctgggtggccagtgggggggtatgcctatgtctttccagatgcagacccaagtgttgagccgcttgatgaccggtcaaggcgcatgcccatacccaccctttatggcagccgctgccgcagcggcatccgcgggattgcagttcgtgaatctcccaccttacaggggcccattcagtctttctaactcaggtcccgggagggggcagcactggccccccctcccaaaattcgatccttccgtgccacctccagggtatatgccgcgccaggaggatccacataaagctacagttgacggcgttcttctggtcgtcctgaaagaactgaaggccattatgaagcgagacctgaacagaaagatggtcgaagtcgttgcctttagagctttcgacgagtggtgggataagaaggaaaggatggctaaagcatctctgacacccgtcaagagtggtgagcataaggacgaagatcggccaaaacctaaagatcggatcgcctcctgtcttctggagagttgggggaagggcgaaggactgggatacgaaggcttgggtcttggcataggcctgcgaggagcaatccgactgcctagttttaaagtaaaacggaaggaaccgcccgatacaacatctagcggggaccaaaagaggttgcggcccagcacctccgtggatgaagaagatgaagaatcagagagggaaagagatcgggacatggctgacactccctgcgagttggccaagcgggaccctaagggggtgggggtgaggaggaggcctgcacgccctctggaacttgactccggaggcgaggaggacgaaaaagaataa

SEQ ID NO: 485 - DNA, 2784 bp, synthetic construct
  source 1..2784: mol_type = other DNA
tccctgtccgcaagctcaagctcttctgccagctcttctagtggctcctcaaccaccagcccttcatcttccgcctccgataaagaagaggagcaggagtctaccgaggaagaagaagaagccgaagaggaagaggaggaggaggtgcctcgcagccagctcagttccagtagcacaagtagcacgtctgataaggacgacgacgacgatgacagcgacgacagggatgagagcgagaacgatgatgaggataccgccttgagtgaggcctctgagaaagacgaaggggattccgatgaagaagagacggtctccatcgtgacttccaaggctgaagccacctcttctagcgagtccagtgaaagttccgagttcgagtcatcttctgaatcaagcccctccagctcagaggacgaagaggaggttgttgcccgcgaagaggaggaggaagaagaagaggaggaaatggttgccgaggagtccatggcttccgccggaccggaagactttgaacaggacggagaggaggccgcccttgctcctggagctcccgcagtggactccctcggtatggaagaggaagtggatatcgagaccgaagccgtggcccccgaagagcggccaagcatgttggatgagcctcctctccccgttggggtggaggaaccggcagactccagggaacctcccgaagagcccggcttgagtcaagagggagctatgctcctctctcctgaaccacccgctaaagaggtggaagcccggccaccactcagccccgagagggctcctgagcacgatctggaagttgagccagaaccgcccatgatgttgcccctgccgttgcaaccgcccttgccaccccctagacccccgagacccccatctccaccgcccgagcctgagacgacagatgccagccatcccagcgttcccccagaaccgcttgcggaagaccatcccccccatactcctggcctgtgcgggtcactcgccaaaagtcaaagcaccgagaccgtgcccgctacaccaggaggcgagcctccactttcaggcggttcttcagggctgtcactgagcagtcctcaagtcccgggaagccctttttcttatcccgctccttccccctccctgagtagcgggggcctgccacggacacccggcagagacttttctttcacaccaacattctctgaaccttcaggacccctgttgctccctgtatgcccccttcccaccgggagaagggacgagcgcagcggccctctggcaagccctgtgctgctcgagaccggactgccactccctctgcccctgcccctgcctctccccctggctctcccggcggtgctgcgggcgcaggctcgcgctcctacaccactgccccctcttctgcctgcccccctcgctagttgccctccaccaatgaaacgcaagccaggcagacctaggaggtcacctccatcaatgctgtcactcgatgggccccttgtccgcccaccagccggcgcggctttgggacgcgagctcctcctgcttccaggtcagcctcagacgccggtgtttccctccacgcatgacccccgaaccgtcactctcgatttccgcaatgcagggatacccgcccccccgccaccactgccaccccagcccccacccccacccccacctccaccagtggagcccacaaaactcccatttaaggagctcgataatcaatggccctccgaggctatccccccaggtcctagaggaagagacgaagtcaccgaggaatatatggaactggcaaaaagtagaggcccttggcggcgccctccaaaaaagagacacgaggaccttgttccccctgcaggatcacctgaactgtcacctccccagcctctttttagacctcgaagcgagttcgaggaaatgactattctttatgatatttggaacggaggaatagatgaagaagacattcggttcctgtgcgtgacgtacgagcggctgcttcagcaagacaatggcatggactggctgaatgacaccctttgggtgtaccatccctcaacatctctttcatctgctaagaagaaaaagagagacgatggcatccgagagcatgtgactggctgtgcgcgctccgagggcttctatactattgataagaaagataaactgcgataccttaattcaagccgggctagcactgatgagccaccggcggatacccaggggatgtcaattccagcccagccccacgcctccacacgggctggatctgagcggagatcagagcagagacgactcctctcctctttcacagggagctgcgacagcgacctcctgaagttcaaccagcttaagtttcggaagaaaaaactgaaattctgtaaatctcacattcacgactggggactttttgccatggagcctatcgccgcagacgaaatggtcatcgagtatgtcggccagaatattaggcaggtgatcgcagatatgagggaaaagagatacgaggacgaagggatcggaagcagctatatgttccgcgtggaccacgacaccattatcgatgcaactaaatgcggcaacttcgccaggttcattaatcattcttgcaatcctaattgttacgccaaggtaatcaccgtggagtcccagaagaaaattgtcatctacagcaaacaacacatcaacgtcaacgaagaaattacgtacgactacaaattcccaatcgaagatgtcaagatcccatgtctctgtggatcagaaaattgcagaggaacacttaactaa

SEQ ID NO: 486 - DNA, 1092 bp, synthetic construct
  source 1..1092: mol_type = other DNA
atgttcgctgaagcggcaaagacaacaaggccttgcggcatggccgagtttaaggagaagcccgaagccccaactgaacagttggacgttgcttgtggccaggagaatctgcctgttggagcctggcctcctggcgcggcccccgccccttttcagtatacacctgatcatgtagtgggccctggtgcagatatcgacccaactcagatcactttccccggctgcatatgtgtgaagaccccgtgtctgccaggaacatgctcatgcctgaggcatggggagaattacgacgataactcttgccttagggatatcggatcaggtgggaagtacgccgaaccagtgttcgaatgcaacgtgctgtgcaggtgttccgaccattgtcggaatcgcgtggttcaaaaaggcctgcaatttcactttcaggtgttcaaaacccacaagaaaggctggggtctcagaacactcgagtttatcccaaaaggccggtttgtgtgcgagtatgcgggggaagtgctcggttttagcgaagtacagagacggatacacttgcagactaaaagcgattctaactacataatagccatccgggagcacgtgtataatggacaggtgatggagacctttgtcgatcctacgtacataggcaacatcgggcgcttcttgaatcactcctgcgagccaaacctgttgatgatccctgtgcggattgacagcatggtcccaaaacttgccctgttcgccgccaaggacattgttcctgaagaagagctgagctacgactattccggaagatacctcaaccttacagtgtccgaagacaaggagcgcctcgatcacgggaagctgagaaagccctgttattgtggcgccaaaagttgtacagcattccttccttttgactctagcttgtactgtccagtggagaaatccaatattagttgcggcaatgaaaaggaaccctctatgtgcggaagcgcccccagcgtgttcccgtcttgtaagagactcaccctggaaacaatgaaaatgatgctggacaagaagcagatccgggctattttcttgttcgagttcaaaatgggtcgctaa

SEQ ID NO: 487 - DNA, 711 bp, synthetic construct
  source 1..711: mol_type = other DNA
caaatcgggaaggtaaagaaactggataaatgggtaccccatgaactgaccgagaaccagaaaaataggcgctttgaggtgtcttcatccctgattctgcgaaatcataacgaaccattccttgataggatcgtaacgtgcgatgagaaatggattctgtacgataatcggaggcgcagtgctcagtggctggatcaggaggaggcccctaagcatttccctaaaccgatcctccatcccaaaaaagtgatggttaccatatggtggagcgctgctgggctgattcattatagttttctgaatcctggggaaaccataacaagcgaaaagtacgctcaggagattgacgagatgaaccagaagctgcaaaggctccagctcgccctggttaatagaaagggacccatcttgcttcatgataatgctagacctcacgttgcgcagcccactctgcagaaactgaatgaattgggttacgaagtgctccctcatccaccgtactcacctgatctgctcccaaccaattaccatgtgtttaagcacctcaataactttctgcagggcaaacggtttcacaatcagcaggatgccgagaacgcgtttcaggagtttgtggaaagtcagtccaccgacttctatgccactggcatcaaccagttgatttcccgctggcagaagtgtgtcgattgcaacggatcatactttgattaa

SEQ ID NO: 488 - DNA, 1800 bp, synthetic construct
  source 1..1800: mol_type = other DNA
atggaaagcaccccttccttcctgaaagggacgcccacttgggagaagaccgcccccgaaaatggcatcgtacgacaggaacccggcagtccccctcgagacgggctccatcatggtcctctgtgcttgggggaacccgctcccttctggcgcggagttcttagcaccccagattcctggcttccaccaggttttcctcaggggccaaaggatatgctgcccctggttgagggtgaggggcctcagaacggcgaacggaaggtgaactggctgggtagcaaggagggtctccggtggaaggaggccatgcttacccacccactggcattctgcgggccagcctgcccaccccggtgcggccctctgatgcccgagcatagcggaggacatctcaaaagtgatcctgtcgccttccggccttggcactgtcctttcttgctggagacaaaaatcttggaacgagcaccgttttgggtgcccacatgtctccccccatacttggttagtgggcttccccctgaacatccttgcgactggcccctgacaccccacccgtgggtctatagcggcggccaacctaaagtccccagcgcgttttctctgggttctaagggtttctattacaaggacccatctattccaagactggcaaaggagccactggctgccgccgaaccaggccttttcggtcttaattcaggaggccacctccagcgggcaggagaagcagaacgacctagtcttcaccagcgggatggtgagatgggtgccgggagacagcaaaatccttgtccactcttccttggccagcccgacacagtaccctggacgtcatggcccgcctgtcccccagggctggtccacactctcggcaatgtgtgggctggtcctggtgacggtaacctcggatatcaactgggcccacctgcaaccccccggtgcccatctcctgagcctccagtgactcagcgagggtgttgctcttcatatccccccacaaaaggcggcggactggggccatgcggcaagtgtcaggaaggccttgagggcggagcctcaggcgccagcgagcctagcgaggaggtgaacaaggccagcgggccaagggcatgccctccatctcaccataccaagctgaaaaaaacgtggctcacacgccacagcgagcagtttgaatgtcccagaggatgtcctgaggtggaggagagaccggttgcgagactgagggcattgaagagggcagggtcccctgaggtacagggggccatgggtagtcccgccccaaaacgaccccccgatcccttccccggcactgcagagcagggagcaggcgggtggcaggaggtacgagacacctccataggaaacaaggacgtggattcaggccagcatgatgagcagaaaggaccccaagatggacaggccagcctgcaggaccctgggcttcaggacatcccgtgtttggccctccccgccaagttggcccaatgccaaagttgtgcccaggcggcaggtgagggaggagggcatgcatgtcacagccagcaggtcaggaggagtccactcggcggcgagctccaacaggaagaagatacggcaactaacagttcaagtgaagaaggcccaggtagcggacccgactcaaggctgtctacaggacttgcaaaacatctcctgtccggtcttggggaccgcctctgccgccttctgaggcgggaacgggaagcccttgcatgggcacagcgagaagggcaggggcctgccgtgaccgaggactccccgggcatcccccggtgctaa

SEQ ID NO: 489 - DNA, 1695 bp, synthetic construct
  source 1..1695: mol_type = other DNA
ggacgagtggctgggacgggtcgggccagagagaaggctgggttccaggagcagagtgctgaagagtgcacacaggaggccgggcacgcagcttgttccctgatgctgactcagtttgtgtcttctcaagcgttggccgagcttagcaccgcaatgcatcaggtgtgggtcaagttcgatattcgcggccattgcccctgtcaagcagatgcacgcgtgtgggcgcccggtgacgctggacagcagaaagagtccacccaaaaaacaccccccacacctcagccaagctgcaatggcgacacacatcgcactaaatccatcaaagaggagaccccggatagtgccgagacgcctgccgaggaccgagccgggaggggaccactgccctgcccatcactctgtgaactgctcgccagtacagcagttaagctgtgtctgggacatgagaggatccatatggcatttgcgccagtaacgcctgcgttgccaagtgatgatcgcattacaaacatactggattcaattattgcacaagtggtggagcgcaagatccaggaaaaggccctgggccctggattgagggcaggacccggccttcggaaaggcttgggccttccactgagtccggtgcggccccgattgcccccccctggcgctctgctttggctgcaggagccgcagccctgtccccgacggggctttcatctctttcaggaacactggcggcaagggcaacctgtattggtgtctggcatccagaggacgctgcagggcaacctttgggggactgaggctctgggggcgctgggaggccaggttcaagcgctgagtcccctggggcctccacagccatcttctctggggtccactactttttgggaaggtttttcctggccagaacttcgccctaaatcagacgaaggctccgttcttcttctgcaccgggcccttggagacgaggacacatcacgagtggagaatttggctgctagcctgccattgcctgaatactgcgctctgcacgggaaactgaacctggccagctacctgcctcccgggctcgccctgcgcccgctggagcctcagttgtgggcagcatacggtgtgtctcctcatagaggccatctgggtaccaagaacctttgtgtcgaagtagccgatctggtaagcattctcgtgcatgccgatacgccactgccagcctggcaccgcgcgcaaaaggactttctttctggactggatggcgagggactttggagcccggggagtcaagtgagtaccgtctggcatgtttttcgcgctcaggacgcccagaggattcgccggtttcttcaaatggtatgtcccgccggtgctggtgcgctggaaccaggcgcccccggcagctgttatctggacgccggactcagaaggcgactgagggaggagtggggagtctcctgttggactctgttgcaagcaccaggcgaagcagtgctggttcctgccggcgctccccatcaggttcagggcctggttagtactgtaagcgttactcagcacttcctctccccggaaacctcagcgttgagtgcccaactgtgccaccagggtcccagtctgcctcccgactgtcaccttttgtacgcccagatggattgggctgtgtttcaagctgtcaaggtcgctgtggggacactccaggaggctaaataa

SEQ ID NO: 490 - DNA, 1080 bp, synthetic construct
  source 1..1080: mol_type = other DNA
atgaaccagaacacaaccgaaccagttgcggccaccgagaccttggcagaagtgccagaacatgtcctgagggggcttccagaagaagtacggctttttccctcagctgtggataaaacgcgcatcggtgtgtgggctaccaagcctatccttaagggaaaaaagttcggtccgtttgttggagataagaagaaaagaagccaggtcaagaacaacgtatatatgtgggaagtctactaccccaaccttggctggatgtgcatcgacgccacggaccctgagaagggaaactggctgcggtacgtgaactgggcctgtagtggggaggagcaaaatttgtttcctctcgaaattaacagggcgatctattacaagaccctgaaacctatagctccaggtgaggaactgctggtctggtataacggggaagacaaccccgaaatcgctgccgctatcgaagaagaacgggcaagtgcaaggagcaagagaagctcccccaagtcacggaaaggcaaaaagaaatcccaggaaaataaaaataaggggaataaaattcaggatatacagctgaagacatctgaacctgactttacttccgctaacatgcgggattccgcagagggccctaaagaagacgaggagaagccaagtgctagcgcactggaacagcctgcaaccctgcaggaggtggcttctcaggaggttcccccggagcttgccactccagcgcctgcctgggaaccacagccggaaccggatgagcgactggaagccgcagcttgtgaggttaatgatctgggagaagaggaagaagaggaggaagaagaggacgaagaagaggaagaagacgatgatgacgacgagctggaagatgagggggaagaggaggcgtctatgcccaatgagaattccgtaaaggaaccggaaatccgctgcgatgagaagcccgaggaccttctggaggagcccaaaactacatctgaggaaacactcgaggactgttccgaggttacacccgctatgcagatcccacgcacaaaagaagaggctaacggcgatgttttcgaaaccttcatgtaa

SEQ ID NO: 491 - DNA, 1884 bp, synthetic construct
  source 1..1884: mol_type = other DNA
gaacgacatctgattcctaaaggcgttcgacggaagggcggcctcgaggagccacaacccccagccgaacaggctcaggccacccagaatgtatatgtcccctccaccgagccagaggaggagggggaggccgacgacgtatatataatggacatttccagtaacatctcagaaaatctgaattactatattgatggaaagatccagactaataacaacacaagtaactgtgatgtgatcgagatggagtccgcctctgctgacctgtacggcattaattgtctgctgaccccagtgaccgtcgagatcactcagaacattaagacgacacaggtgccagtgaccgaggacctgcctaaagagccactgggatcaacaaatagcgaagccaagaagaggagaacggcgagcccccctgcactgccaaaaatcaaggccgaaaccgacagcgatccaatggtacccagttgttccctctcactgcctctgagtattagtactactgaggctgtcagcttccataaagagaaatctgtttatttgtcctcaaaactgaaacagttgctccaaactcaggataagctgactccagcaggcatttctgccaccgagatagctaagttgggaccagtgtgcgttagtgcacccgcatccatgctgcctgtcacaagctcccgctttaagcggcggacaagtagccctccctcctcaccccagcacagtccagccctgcgagattttggaaagccctctgacggcaaagctgcgtggacagatgctggcctgaccagcaaaaaatctaagcttgagtcacacagcgactcacccgcctggtcactctctggccgggacgagcgcgaaactgtgtctccaccgtgttttgatgaatataagatgagcaaggaatggacagcctccagtgccttctctagcgtatgcaatcagcaacccctggatttgtcaagcggagtcaagcagaaagccgaaggtactggcaagacacccgtccagtgggagtccgtgcttgaccttagcgtgcataaaaagcactgttctgatagtgaggggaaagagtttaaagaaagccactccgttcaacccacttgcagtgccgtcaaaaaacgaaagcccaccacatgcatgcttcagaaagtgctgctcaatgaatacaatgggattgaccttcccgtggagaacccagctgacgggactcgatcacctagcccatgtaagagtctggaggcacagcctgatcctgatctgggaccaggttccggctttcccgcccccacggttgaatctacgccagatgtgtgtcctagttcaccagccttgcagacacccagtctcagttctggacagctgcccccactcctgatcccaactgacccttcaagccctcctccttgccctcccgtgcttacagttgccacaccaccgcctcctctcttgccgaccgtacccctgcccgctccctctagttcagcaagcccgcatccttgcccaagtccgctcagcaatgctaccgcccagtcccctctgcctatcctcagcccaactgtttccccctccccatcccctattccccctgtcgagccactgatgagtgcggccagtcccgggccgcctactctttcaagcagctcttcatcctcatccagtagcagctcttttagctctagtagttcatcctcaagtccaagtccgcctcccctttccgcaatctcctccgtagtgagtagcggagataacttggaggccagtctgcctatgatctcctttaagcaggaggagctggagaatgagggtcttaagcccagagaggaaccacagagtgctgctgagcaggacgtggtggttcaagagaccttcaacaaaaattaa

SEQ ID NO: 492 - DNA, 1515 bp, synthetic construct
  source 1..1515: mol_type = other DNA
cccgacaaagtgtgcacccaccatgagtttgaatcagggaccctgcggcctcaaaactttactgacccttccaaggctcatgtggagcatatgcagtctctgccagaagatccgttggaaaccagcaaagaggaggaggaactgaacgacagcagtgaggagctttataccactatcaagatcatggcttccggcattaagactaaagaccccgacgttcggctgggtctgaatcagcactatccgtcatttaagccacctcccttccagtaccaccatcgcaacccaatggggattggcgtgactgctacaaatttcaccacacacaacatcccccagacttttacaacggccataaggtgtacaaaatgtggtaagggcgtggataacatgcctgagttgcacaagcacatactggcctgtgctagcgcaagtgacaaaaagcgctacacccccaaaaagaaccctgtgcctctgaaacagactgtccagcccaaaaacggcgtagttgttctcgacaattcaggcaaaaacgcgtttaggcggatgggccaacccaagcgcttgaacttttccgtggagctgagcaagatgagttctaacaaattgaaactgaatgccctgaagaaaaaaaatcagctcgtgcagaaggcaatcctccagaagaataagtctgccaaacagaaggccgacctgaagaatgcctgcgaaagctcatcacacatctgtccttattgcaacagggaatttacatatatcggctccctgaataagcatgcagcattcagttgtccgaagaagcctctgagccctcccaagaaaaaagtatcacattcctccaagaaaggaggacattcttccccggcaagttcagacaaaaatagtaacagtaaccacaggagaaggacagccgacgctgagataaaaatgcaatcaatgcagaccccattgggtaaaacccgagcccgcagctccggccccacacaagttcccctgccaagctcatccttccggagcaagcagaatgtgaaattcgctgccagcgtgaaatcaaagaagccgtcatcatcatcccttcgaaactctagtccaatccgcatggcaaaaatcacccacgtcgaaggcaagaaacctaaggctgtcgcaaaaaaccattctgcacagctttcctcaaagaccagcagatccctgcatgtcagggttcagaaatccaaagctgttctgcagtcaaagagcaccttggcatccaagaagcgaaccgaccgctttaatatcaaatctagagaacgatcaggcggtcccgtgactaggagtcttcagctcgccgcagccgcggatctctccgagaataaacgggaggatgggagcgctaaacaagagcttaaggatttctcttacagcctccgactggccagtcggtgttccccccccgcggctccctatatcacacgccagtacagaaaggtcaaggcgccagctgccgcgcagtttcagggtccatttttcaaggaataa

SEQ ID NO: 493 - DNA, 1008 bp, synthetic construct
  source 1..1008: mol_type = other DNA
gaaaaatatctgtccgagctggctgagcaacccgagagaaaaattacccgcaaccagaagcggaagcacgatgaaattaaccacgttcagaagacctacgccgaaatggacccaacaacagctgccctggagaaggagcacgaagcgatcaccaaggtgaagtatgtggataagatccacatcggcaactacgagatcgacgcttggtatttttctccttttccagaagactacgggaagcagccaaaattgtggctttgcgaatactgcctgaagtacatgaagtatgagaaatcctacaggttccatttgggccagtgtcagtggcgccagccccccgggaaagaaatttacaggaaaagcaacatatcagtctatgaggttgacggcaaagaccataagatatactgccaaaacctttgcctgctggcaaaactctttctggatcataaaactctttattttgatgttgaaccatttgtcttttacatcctgaccgaagtggaccggcaaggtgcacatatcgtggggtactttagtaaggagaaggagtctccggacggtaacaatgttgcttgcattcttacactgcccccgtatcagcggcgagggtacgggaaatttctgatcgccttctcatacgaactgtctaagctggagtccactgtgggctcccccgaaaaacccctttccgatctgggcaaattgtcttaccgaagttactggagttgggtcctgcttgagatccttagagatttcaggggcaccttgagcatcaaggacttgtctcagatgactagcattacccagaatgacattatctccacactccagagtctgaatatggttaagtactggaagggccagcatgttatttgtgtgacccctaaattggtggaagaacatcttaagtcagcacagtacaaaaagcctccgatcaccgtagacagtgtgtgtctgaaatgggcccctcccaagcacaagcaggtaaaactgtctaaaaaataa

SEQ ID NO: 494 - DNA, 1692 bp, synthetic construct
  source 1..1692: mol_type = other DNA
atggagcccgaggaggagcgcatcaggtactcccagcgcttgaggggcactatgcggaggagatacgaagacgatggtatctcagatgatgagattgagggcaaacgcacctttgatctcgaagaaaagctccacaccaacaagtacaatgctaatttcgtgacctttatggaaggtaaggattttaacgtcgaatacattcagcggggtggtctgcgcgatccactgatttttaaaaacagcgacggcctcggtattaaaatgcctgaccctgacttcaccgtcaacgacgtcaaaatgtgcgtgggctcacgccggatggtggacgtcatggacgttaatactcagaaggggatcgagatgacaatggcccaatggactaggtattacgaaaccccagaggaggagcgcgaaaagctctataatgtgattagtctggaattttcacacactaggcttgagaatatggtgcagaggccaagcaccgttgatttcatagattgggtcgataatatgtggcccagacatctcaaagagtctcagactgaaagtaccaacgctatcctcgagatgcaatacccaaaagtccagaagtactgcctgatgtctgtgcgaggctgctacaccgactttcatgttgactttggaggtacgagcgtgtggtaccacattcatcaggggggaaaagtcttctggcttatccctcccactgcccacaaccttgagctgtatgagaactggctcctcagcggaaaacagggcgatatttttttgggagaccgggtgtccgactgtcagagaatcgaactcaagcagggatacacctttgtcatcccctccggctggatccacgccgtctacactccaaccgacactctggtgtttggtggaaattttctgcatagcttcaatatacctatgcaactgaagatctataatattgaagacaggacacgggtccctaataagttcagatatccattctattacgagatgtgctggtatgttcttgaaaggtacgtgtactgcatcacaaacaggtctcatcttactaaagaattccagaaagagtcactgtccatggatctggaactcaacggtcttgaatctgggaacggtgacgaagaagctgtcgatagagagcctaggagactctcaagtaggaggagcgttctcacttctcctgttgctaacggggtaaaccttgactatgacggccttggtaagacatgcagaagtctcccctctttgaaaaagaccctggccggcgactctagttcagattgttctagaggatctcataatggccaagtgtgggaccctcaatgcgcacccaggaaagaccggcaagtccatttgactcacttcgagctggagggccttcgatgtcttgtggataaactcgagagcctccccctgcataagaaatgtgttccaactgggatcgaggatgaagacgccctgatcgcagacgtgaagattttgctggaggagctggccaactccgatcccaagctcgcactgaccggcgtgcccatcgtgcagtggccaaaacgcgacaagctcaagttcccaacaaggcctaaggtgcgcgttccaacaataccaatcactaagcctcataccatgaagcccgcaccgcgattgacccccgttaggccggccgccgcaagtcccatcgtgtcagggtaa

SEQ ID NO: 495 - DNA, 1455 bp, synthetic construct
  source 1..1455: mol_type = other DNA
gactcaagtgagaaagcacaaaaacggaagatggaagagagtgatgaggaggccgtgcaagctaaggttctgcgcccgctgaggagttgcgacgagcctctgactcctcctcctcactctcctacttcaatgctgcaactgatacacgaccctgtgtcccctcgagggatggttaccagatcttcccctggcgcgggaccttctgaccatcactccgcctcccgggacgagcgcttcaaaagaagacagcttttgcggttgcaagcaactgaacgcactatggttcgggagaaagagaataatccatcagggaagaaagaactctccgaggttgagaaagccaaaatcaggggctcctacctgaccgtgacgctccagcggcctacaaaggaattgcacggcacaagcatcgtacccaagctgcaggcaattacagcctcttccgctaatcttcggcactctcctagagtccttgtccagcattgtcccgcacgaacacctcagcggggggatgaggaaggccttggcggggaagaggaggaggaagaggaagaggaagaagaggatgactccgcggaggaggggggagctgctagactcaacggccggggcagctgggctcaggatggggatgaaagctggatgcagcgagaggtctggatgtcagtgttcaggtacttgtcccgccgggagttgtgtgagtgcatgcgagtctgcaaaacttggtacaaatggtgctgtgacaagcgcctgtggaccaagatcgatttgagcaggtgcaaagctattgtgccccaggcactttccggaataattaagcgacagcccgtctccctggacctgagctggactaacatttcaaagaagcaacttacgtggttggtgaataggctgcccgggctgaaagatctccttctggctggatgctcatggagtgcggtttcagcactctccacctcatcttgccccctgctgcgaacgctggatctgcggtgggctgtcggcattaaagacccccagatcagagacctgctcaccccgcccgcggacaaacctgggcaggataaccgcagtaagctcagaaatatgacagacttcagattggcaggtctcgatattacagacgctactctcaggctgattatccgccacatgcctctgctgtctaggttggatttgtctcactgctctcacctgaccgaccagagctcaaatcttctgacagccgtcggttcctctacgagatactctctgacagaacttaacatggccgggtgtaacaaattgaccgaccagactctgatctatcttcgccggattgccaatgtcacactgattgacctcaggggatgcaaacaaatcacaaggaaggcatgcgagcactttatcagcgacctcagcattaatagcttgtattgtctgtccgacgaaaaactgattcagaaaatcagctaa

SEQ ID NO: 496 - DNA, 1212 bp, synthetic construct
  source 1..1212: mol_type = other DNA
atgaatcacaaaagcaaaaaaaggatccgagaggctaagcgcagtgcccgaccggagctgaaggattccctcgattggacccgccacaactactacgagtcatttagtctgagccccgcggctgtggccgataacgttgaaagagccgacgcactccagctgagtgtggaggagtttgttgaaagatacgagaggccttacaagcccgtcgtcctgctgaatgcacaggaggggtggtctgcccaagagaagtggacgctggagcggctcaagaggaaataccgcaatcagaagttcaaatgcggggaagataatgacggttatagcgtgaaaatgaagatgaagtactacatcgagtatatggagtctaccagggatgatagtcccctgtacatattcgatagctcttacggtgagcatcccaaacgcaggaagctgctggaggactacaaggtgcctaagtttttcacggacgatctgttccaatatgcaggcgagaaacggagacccccctaccgctggttcgtcatggggcctccccgatctggtacagggatccatatcgaccctctgggaacctcagcgtggaatgccctggtgcaggggcataagcgatggtgcctcttcccgacctccacccctcgcgagctgattaaagtgacacgagacgagggaggaaaccagcaggatgaggccattacctggttcaacgtcatctaccctaggacccagttgcccacttggcctcccgaatttaagcccctcgagatactgcaaaagcccggggaaacagttttcgtgccagggggctggtggcatgttgtccttaatctggatacaacgatcgcgattactcaaaactttgcaagttctaccaatttcccagtggtctggcacaaaaccgtgcgcggcagacccaagttgagtcgaaagtggtacaggatcctgaagcaagaacacccagagctggctgttcttgctgatagtgttgacctccaggagtctactggaatcgcatcagattcttcatccgatagctcatcatcttcttcctcttccagctcagacagtgactctgagtgtgaaagtgggtcagagggcgatggtaccgtgcaccgacggaagaaaaggcggacttgtagtatggtgggcaacggagacaccacctctcaggatgattgcgtcagtaaagaaaggtcttcttcccgataa

SEQ ID NO: 497 - DNA, 2562 bp, synthetic construct
  source 1..2562: mol_type = other DNA
atgaagggagatacccgccacctcaatggagaggaagatgcgggcgggcgcgaggactccatactggtgaacggggcttgttccgatcagtcaagcgactccccgcccatattggaggctattcgaacccccgagatacggggccgcagatcttctagtaggctgtcaaagcgggaagtgtcttccctgctctcttacacccaagacctgactggggacggagatggcgaggatggagacggcagtgacacccctgtaatgcccaagttgtttcgggagactaggacaaggtctgaatcccccgctgtgaggacccggaacaacaattccgtttctagtagggaacgccaccgcccgagccccaggagcacgcggggcaggcaagggagaaatcatgtcgatgagagccccgtggagttccctgccacacgaagcttgcggagaagagccaccgcctctgcaggaaccccttggccttcccctcctagttcctatctgactatcgatcttactgacgacaccgaggatactcacggaaccccacagtccagctccactccctacgcacggctggcccaggattcccagcagggcggcatggagtctccccaagtggaggctgacagcggcgacggggattccagcgaataccaggatggcaaggagttcgggatcggagatctcgtgtggggcaagatcaaagggtttagctggtggcccgccatggtagtgagttggaaggctacttcaaagaggcaggccatgtccggcatgaggtgggtccaatggttcggagacgggaagttttccgaagtgtccgccgataagctcgtggctctgggcctgtttagccagcacttcaatctggccacattcaacaagttggtgtcctacagaaaggctatgtaccatgcattggaaaaggctagggtcagagccgggaagaccttcccttcatccccaggagattccctcgaagatcagcttaaacccatgctggaatgggcacacggcggtttcaagcccactgggatcgagggattgaaacccaataacactcagcctgtggttaataagagtaaggtgaggagagcagggtctcgaaagctggagagccggaaatacgagaacaagaccagacgacggaccgccgacgactcagccacttccgactactgtcctgctccaaaaagactcaagactaactgctacaacaatggaaaagaccggggcgacgaagatcagtcccgagaacagatggccagcgacgtcgctaacaataagtcctcccttgaagatgggtgcctgtcttgtggaaggaagaatcccgtttccttccaccctctgtttgagggaggactgtgtcagacatgtagggatcgctttttggaacttttctacatgtacgacgacgatgggtaccagtcatactgcaccgtctgttgcgaaggaagagagttgctcctctgttccaacacaagctgctgtcggtgcttttgtgtggagtgccttgaggtgcttgtaggaacagggacagcagccgaggcaaaactgcaagaaccctggtcatgctacatgtgcctcccccaaagatgccacggcgtgctcagaaggaggaaggattggaacgtgaggctgcaagccttcttcacatcagacaccggactcgagtacgaggcacctaagctgtaccctgctatccctgctgcccgccggaggccaatccgcgtgctgtcactgtttgatggcatcgctaccgggtacctcgtccttaaggaattgggcatcaaggtaggtaagtatgtggcaagtgaggtgtgtgaggaatccatagccgtgggaacagtgaagcatgagggcaatatcaaatacgtaaacgatgtacgaaatatcacaaaaaagaacatcgaggagtggggacctttcgaccttgtgataggaggcagtccctgtaatgatctctctaatgtgaaccccgccagaaaggggctgtatgaaggcacaggtaggctgttcttcgagttttaccacctcctgaattattcaaggcctaaagaaggcgacgacagaccctttttttggatgtttgagaacgtggtggccatgaaggtgggggacaagcgggacatatcccgattcctcgagtgtaatcctgtgatgatagatgctatcaaggtgtccgccgcgcacagggcccggtatttttggggcaatcttcctggtatgaatcggcccgtgattgccagcaagaacgacaaacttgaattgcaggattgcctggaatacaaccgcatcgctaagctcaaaaaggtgcagaccatcaccaccaaatccaacagtatcaagcaggggaagaatcagctgtttccagtagtgatgaacgggaaggaggatgtgctctggtgcactgaactcgagcgaattttcggttttcctgtacactatactgacgtttccaatatgggcagaggagcacgacagaaactgctgggcagatcttggtcagtgcccgtcataagacacttgttcgctccgctgaaggactattttgcttgcgagtaa

SEQ ID NO: 498 - DNA, 762 bp, synthetic construct
  source 1..762: mol_type = other DNA
atggaactggaacaacgcgagggcaccatggctgctgtgggctttgaggaattctccgctcctccggggagcgagctggccctgcctcccttgtttggcggtcacatcctggaaagcgaactcgagaccgaggtagaattcgtgtctggaggactgggcggctcaggccttagagagagagatgaagaagaggaggcggccaggggcagaagaaggaggcagcgcgaactgaacaggcgcaaatatcaggccctgggccgccgctgtagggaaattgaacaggtcaatgagcgcgtactgaaccggctgcatcaagtgcagcgaatcacacggagattgcagcaagaaaggcgcttcctgatgcgcgtcttggactcctatggggatgattaccgggcatctcagttcaccattgtgctcgaggatgaaggctcacaggggaccgatgctcctaccccaggtaacgccgaaaacgaaccacccgagaaggaaacattgtcccccccaaggagaacacccgcgccaccagagcccggcagccccgccccaggtgaaggcccaagcggtcgaaagagacggagggtgcctcgcgatggccgccgggccgggaatgcactcacgccagaacttgctccagttcaaataaaggttgaagaggacttcggatttgaggcagatgaggctttggatagttcctgggtcagcagaggccccgataaactgttgccctatccgacattggctagtccagcctcagactaa

SEQ ID NO: 499 - DNA, 2721 bp, synthetic construct
  source 1..2721: mol_type = other DNA
atgcaccgagccgtcgatcctcccggtgccagagcagcccgcgaagcctttgccctgggaggcctcagttgtgccggggcctggtcttcttgtccgccgcaccccccgccgcgatcagcctggctgcctggtggcagatgttccgctagcatcggccagccaccattgccagccccactcccaccctctcacgggagctccagcggccacccctctaagccttactatgcacccggggctcccacaccccggccacttcacggtaaacttgaatctcttcacgggtgtgtgcaggccttgctgcgcgagcctgctcaacccgggctgtgggagcagctggggcaactgtacgaatccgagcacgattctgaggaagccactcggtgctaccactctgctctgcgctatggtggatccttcgccgaactgggtcccagaatcgggcgcctgcagcaggcgcaactctggaactttcacaccggttcctgccaacaccgcgcaaaagttttgcctccgcttgaacaagtgtggaatctgctgcatttggaacataaacgcaattacggcgctaaacggggtggccctccggtcaagcgggccgctgagccgcctgtggtacaacctgttccccctgctgcattgtccggaccatccggcgaggagggattgtccccaggcggtaaacggcgacgcggctgcaatagcgaacagacggggctgccgcctggactgcctctcccgcctccccccctgccacctcccccacccccacctccccccccacctccccccctgccagggttggcgacttctccaccatttcagttgacaaaaccgggactgtggtccaccctgcatggcgatgcttgggggcctgagagaaaaggctcagcccctcccgaaaggcaggagcagcggcattccttgccgcacccatatccctatcctgctcctgcgtacactgcgcatccgcccgggcatcgcctcgtcccagctgcaccccccggacccggtccacgacctcctggagccgagtctcatgggtgccttcccgccacacggcctccaggttccgacctgcgggaaagccgggtgcagagaagccgcatggactcatccgtctcacctgctgccactaccgcttgcgtgccctacgccccttctcggccacccggcctccctggcaccaccacctcttcctcatctagcagtagctccaatacgggtctcagaggcgtcgagcctaatcccgggattcccggtgccgaccattaccagacaccagcgcttgaagtgtcacaccacggccggctgggcccctctgctcattctagtcgcaaacctttcctgggggccccggccgcgacacctcacctcagcctgcctccgggtcccagtagtccaccaccacccccatgcccaagattgctgcggccaccgcctccaccagcctggctgaagggacccgcatgtagagccgctagggaggacggggaaatacttgaggagctgttcttcggcacagaaggccccccccgcccagcaccacccccgctgccccacagagaaggctttttggggccccctgccagcagattctcagttggaactcaggacagccacaccccccccactcctcctacccctacaacttctagctctaacagcaatagtggctcccacagcagctctcctgccggaccagtatcattcccaccacctccctatttggctcgaagcattgacccacttcctaggcctcctagtcccgctcagaatcctcaagatccacctctggtgccgctgactctggccttgccaccggcgcctcccagttcctgccatcagaacacaagtggctcatttaggcgccctgaatcaccccggccacgggtgagctttcccaagactccagaagtggggcctggtcctccaccgggtccactgtctaaggccccacagccagtcccccctggagtgggtgagctccccgccagaggacctagactcttcgacttcccccctacaccactggaggatcagtttgaagagccagccgagttcaaaattctgcccgacggcttggccaatattatgaagatgctggatgagagcatacgaaaagaggaggagcagcagcaacatgaggctggcgtggctcctcaacctcctcttaaggagccttttgcctctctccaaagcccgtttcctactgatacagcccccacaacaaccgcccctgccgtcgccgtcactacaacaacgaccaccacaaccacgaccacggcaacacaagaagaagaaaagaagccccctccagcgcttcctcctccccctcccctggccaagttccctcccccgtcccagccccagcctcctccccctccacccccatcacctgcctcattgctgaagagccttgccagcgtcttggaagggcagaagtactgttatcgcggcacaggtgccgcggtgtctacaaggcccggcccactccccaccacccagtacagtcctgggcccccatcaggagctaccgccctgccgcccacttccgcagctcctagcgctcagggttcaccccaacccagtgcttcttcttcctctcaattctccacttccgggggtccctgggcgcgggaacggcgggccggtgaggaaccggttcccgggcccatgacacctactcagcccccaccccctctcagcctgccaccctaa

SEQ ID NO: 500 - DNA, 2214 bp, synthetic construct
  source 1..2214: mol_type = other DNA
gctaggtcagaaagcgaggtccttgaagagattagcagagcttgtgaaaccctggttgagcgcgtggggcgctctgcaacggatcccgccgatcccgtagacacagctgagcctgcagactcaggaaccgaaagactcctgccgcccgcacaggctaaagaggaggcgggaggagtggctgctgtgagcggctcatgcaagagacgccagaaagagcatcaaaaggagcatcgccgccaccgaagggcctgtaaagattccgtcggacgccggccccgcgagggtagagcgaaggccaaagctaaagtacctaaggagaagtcccgaagggtgctcggcaatctcgatctgcagtcagaggaaatccagggtagagagaagtctaggccagatcttgggggggcttcaaaggcaaagccaccaaccgctccggcccccccttctgccccggctccaagtgctcagccaacccccccatctgcatcagttcccggcaaaaaggcccgcgaggaggctccaggacctcccggagtcagtagagctgatatgctgaaattgagatcactgagtgagggaccccctaaagagttgaagatccgcctgattaaagtggaaagtggcgacaaggaaaccttcatagcatccgaggtcgaggaaagacggcttcgcatggcagacctcaccattagccattgtgcagctgacgtggtacgagcctcccggaacgccaaggtgaagggcaaattccgggagagctacctctcacccgcgcaaagcgttaaacctaaaattaataccgaagagaagctcccaagggaaaagctcaatccccctaccccaagcatatatctggagtctaagagggacgcttttagccccgtgctcttgcaattctgcactgatcctcggaaccctattacagtcatccgcgggctcgccggatctctgcggctgaacctgggactgtttagtaccaagactctggtcgaagcctctggggaacatacagtcgaggtccgaacccaggtgcaacaacctagcgatgagaattgggacctcacagggaccagacagatctggccctgtgagtcaagccgctcacatactaccattgccaagtatgctcagtatcaggccagtagcttccaagaatccctgcaggaggagaaggaaagtgaagacgaggagtccgaagagcccgattccacgactggaactcctccttccagcgcccccgaccccaagaatcaccatatcatcaagtttgggacaaatatagatctgagtgacgcgaagcggtggaagccacagctgcaggaactgctgaaactgcccgctttcatgagggtaacaagcaccgggaacatgctttctcacgttggtcacactattctcggcatgaacactgtgcagttgtacatgaaagtacccggtagcaggaccccgggtcatcaagagaacaataacttttgttctgtaaacataaacattgggccgggcgactgtgaatggttcgcagttcatgaacattactgggagaccatctcagctttttgcgacaggcatggcgtcgactacctcaccggcagttggtggccgattctggatgacctctacgcatctaatatccccgtctataggtttgtacagcggccaggtgacctcgtttggatcaacgccggtaccgtccattgggtccaagcaacagggtggtgcaacaacattgcctggaacgtgggaccactgacagcgtaccagtaccaactcgctcttgaaaggtacgagtggaacgaggttaagaatgtcaagtccatcgtcccaatgatacatgtcagctggaatgtggccagaaccgtcaaaataagcgaccccgacctcttcaagatgataaagttctgtttgcttcagagtatgaaacattgtcaggtgcagagagagtctctcgttcgagccggcaagaagatcgcctaccagggacgcgtgaaggacgagcccgcatactattgtaacgagtgcgacgtcgaggtatttaacattctcttcgtaacctctgagaacggatccagaaacacctatctggtgcactgcgagggatgtgcaagaagacggtccgcaggactgcagggtgtggtggtgctcgagcagtacagaaccgaagagttggcccaagcctacgatgcctttacactggccccagcgtccacctcccggtaa

SEQ ID NO: 501 - DNA, 2010 bp, synthetic construct
  source 1..2010: mol_type = other DNA
atggccgctgccgcaggtggcggcggacccggaacagccgtgggcgccactggatccgggatcgccgcagctgccgcaggactggcagtctacagaagaaaagacggagggcccgcaactaaattttgggagtctcctgagactgtctcacagttggacagtgtgagggtatggttgggaaaacattataaaaagtatgtccatgctgacgctcctaccaataagacgcttgccggattggtagtccagcttcttcagttccaagaggacgcatttggcaagcacgtgaccaaccctgcctttacaaagctcccagccaagtgttttatggattttaaagccggcggagcactgtgtcatatcctgggggcagcctacaaatataagaatgagcaagggtggaggagattcgacctgcaaaacccatctcgaatggaccggaatgtggagatgtttatgaatatcgagaagactttggtgcagaataactgcttgacaaggcctaacatttacctgatcccagacattgatctgaaattggccaacaaactgaaagacattatcaaacggcatcagggcacgtttacagacgagaaatccaaggcctcccaccacatctatccttatagtagctctcaggatgatgaggaatggttgagacctgtgatgcgaaaggagaagcaggtgctggtgcactggggcttctacccggatagttacgacacttgggttcactccaacgacgtggacgcagagattgaggacccccctataccagagaaaccatggaaagtgcacgtgaagtggatcctggatacagacatctttaacgaatggatgaatgaagaggattacgaagttgacgagaacagaaaaccagtctcttttcgacaaagaatatccactaagaacgaagaaccagtgcggagtcccgagcggcgggacaggaaggcctctgccaacgcccggaaaagaaagcactctccaagcccgccccctcccacaccaactgagagtcgcaagaaatctgggaagaagggacaggccagcctgtacggaaagcgcagaagtcagaaggaggaagatgagcaagaggacttgactaaggatatggaggatcctactcctgtccctaacatcgaagaggtagtgctccccaagaacgttaatcttaaaaaagacagtgagaatacacctgtcaaagggggaactgtggcagatctcgatgagcaggatgaagagactgttacagcgggcggaaaagaagacgaggacccagcaaagggagaccagagcaggagcgtggacttgggcgaggacaatgttacagaacagacaaatcatataatcatcccctcctacgcgagctggttcgactacaactgcatccacgtgatcgaaagaagagctctgcccgagttttttaatggtaagaacaaaagcaagacccctgagatttatctggcttaccggaactttatgattgacacctataggttgaacccacaggagtacctgacctctacagcatgccggcgcaatctgacaggagatgtatgtgccgttatgcgggtgcatgcctttctggagcaatggggattggtcaattaccaggtcgaccccgagagtcgaccgatggccatgggccctcccccaaccccccatttcaatgtgctggccgatacaccatcaggacttgtaccactgcatctgcgaagcccacaagtgccagctgcccagcaaatgctcaacttccccgagaagaataaggagaagcctgtggacttgcagaactttggactcagaacagatatatactctaagaaaacactcgctaagagcaagggtgctagcgcgggccgcgagtggactgagcaggaaacactgttgcttttggaggctctcgaaatgtacaaggatgactggaacaaggtttctgaacacgtgggaagcagaacccaggacgagtgtattcttcatttcctcagattgccaattgaagacccctaa

SEQ ID NO: 502 - DNA, 1974 bp, synthetic construct
  source 1..1974: mol_type = other DNA
attatcatcccttcttacgcttcatggtttgactacaactgtattcacgtgatcgagagaagagcgctcccagaattttttaacggcaagaataagagcaaaacccccgaaatctatcttgcctacaggaacttcatgatcgacacatacaggcttaacccacaagagtacctgacgtcaacggcgtgtcgccggaacctgactggcgatgtctgtgctgtgatgcgcgttcacgcttttctggagcagtgggggctggtgaactaccaggtggatccagagtcccggcctatggcaatgggaccccccccgacgccccactttaatgtcctcgccgatacaccaagcgggctggttccactgcatctgagatcaccccaagtccccgctgcccagcagatgctgaacttccctgagaaaaataaggagaagccagtcgacttgcagaactttggccttcggaccgatatctatagcaagaagacactggctaaatctaagggtgctagcgccggccgggagtggaccgagcaggagacactgcttctgctggaggctttggaaatgtacaaggacgactggaataaggtcagcgagcacgtaggtagcagaacccaggatgagtgcatcctgcactttctcagactgcccatcgaggacccctacctcgaaaacagtgatgcctcactcgggccccttgcttaccagcccgtccccttctcccagagcggcaatcccgttatgtccacagtcgcgttcttggcaagcgtggtcgacccgagagtagcctccgccgccgctaaggcagcactcgaggagttctcacgcgtgagagaggaggtgcctctggagctggtggaagctcatgtgaaaaaagtccaggaggctgctcgggcaagtggtaaggtggacccaacatacggcctggaaagttcctgcatagccggtacaggacctgatgagccggagaaactcgaaggtgccgaagaagaaaagatggaagctgacccagacggacagcaacctgaaaaagctgagaacaaagtggaaaatgagaccgacgagggggataaagcacaagacggagagaacgaaaaaaactccgagaaggaacaagattcagaagtttccgaagacaccaaaagcgaagagaaagagaccgaggaaaataaagagcttaccgacacttgtaaagaaagggagagtgatactggaaagaagaaggtggaacatgagattagtgaagggaatgtggctactgccgccgctgctgccctggcttctgccgctactaaggctaagcacctggccgctgtcgaagagagaaagatcaagtctctggtcgctctcctcgttgagacccagatgaagaaactcgaaattaaattgagacactttgaagagctggagaccatcatggatcgcgagaaagaagccctcgagcagcagcggcagcagttgctcaccgagagacaaaacttccatatggagcaacttaagtacgcagagctccgcgcccgccaacagatggagcagcagcaacacgggcagaaccctcaacaagcccaccagcattcaggggggcccgggttggcgcctctcggcgcagccggacaccccggtatgatgccgcaccagcagcctcccccatatccactgatgcaccatcaaatgcctccaccacacccacctcaacctggccagatccccgggcccggtagcatgatgccaggccagcatatgccaggcagaatgattccgaccgtcgccgctaatatccacccaagcggcagtggtccgaccccaccggggatgccacccatgccagggaatatcctcggaccacgagtgcccctgacagctccaaacggcatgtaccccccaccaccacagcaacagcccccgcccccaccaccagcggatggcgttcccccaccccctgcacccggtccccctgcttctgcagctccttaa

SEQ ID NO: 503 - DNA, 2193 bp, synthetic construct
  source 1..2193: mol_type = other DNA
atgggttctgaggaccacggggctcagaatccatcttgtaaaatcatgaccttcaggcccacaatggaggagttcaaagacttcaataaatacgtggcctatattgagtcccagggcgcccaccgcgctggtctggccaagattatcccccctaaggagtggaagccaagacagacctatgacgacattgatgatgtagtgattcctgctccgatacaacaggttgtgaccgggcaaagtggtctgttcacccaatataatatccagaaaaaggccatgaccgtgggagaatatcggaggctggccaatagcgaaaaatactgtacacctagacaccaggactttgatgacctggaaaggaaatactggaagaatctcaccttcgtcagccccatctatggagccgatatctctggatctctctatgacgatgacgttgcccagtggaacattgggagccttcggactatccttgatatggtggagcgggagtgcggaacgattatcgaaggcgtcaacacgccctatctctacttcggcatgtggaagaccaccttcgcctggcacacagaagacatggatctgtactccatcaactacttgcatttcggcgagccaaagtcctggtatgccatccctccggagcacggcaagaggttggaacggctcgctattggcttcttcccaggctcatctcaagggtgcgatgccttcctgcggcacaaaatgaccctgatttctcctattattctgaagaaatacggaattcccttctcaaggattacacaggaagcgggcgagtttatgataacatttccttacggataccatgctggcttcaaccatggcttcaattgcgccgagagcaccaatttcgcaacgttgcgatggattgactatgggaaggttgctactcagtgcacatgtaggaaggacatggtcaagatctctatggatgtgttcgtgcgaatcctccagcccgagagatacgaactgtggaagcaggggaaggacctgaccgttctggaccacacacgccctaccgcgctcacttcacctgagttgtccagttggtctgcaagtcgagcgtccctgaaggcaaagctgctgcgccgaagccaccggaagcgctcacaaccaaagaaacctaaacctgaagatccaaagtttcctggcgaagggaccgccggcgccgccctgctggaagaagctggaggctccgtgaaagaagaagccggcccagaagtggatccagaagaggaggaagaggagcctcaaccactgcctcacggaagagaggccgagggggccgaggaagatggtagaggaaagctcaggcccacgaaagccaagagtgagagaaagaaaaaatctttcggattgctgcccccccagctgccacccccccccgctcacttcccctcagaagaagccctctggctcccttctcctctggaaccccccgtgctcggaccaggacccgccgccatggaggagagtcctctccctgccccactgaatgtcgtgcctcctgaagtccctagcgaagagttggaagcaaaacctcggcccatcatcccgatgctgtatgtggttcccagacctggcaaagcggcattcaatcaagagcacgtcagctgccaacaggcttttgagcacttcgcccaaaagggacctacctggaaggaacctgtcagtcctatggagctcactggcccagaggatggagctgcaagctcaggtgctggccgaatggagaccaaagcaagagccggagagggtcaggctcccagcacttttagtaagcttaaaatggaaataaagaagtctcggaggcatccactggggcgccccccgacacggagcccactgtcagttgtgaagcaagaggccagttccgatgaagaagccagccccttcagtggcgaggaagacgtgtccgacccagacgccctgagaccactcttgtctttgcagtggaaaaatagagccgctagctttcaggcggaacgcaagtttaacgcggcagccgctagaaccgaaccatattgcgccatctgtaccctgttctacccctactgtcaagcactgcagacagaaaaagaagcccctatagcatctctgggcaaagggtgccccgcgacactgccgtccaaatctaggcagaagactagaccactcattcccgagtaa

SEQ ID NO: 504 - DNA, 1986 bp, synthetic construct
  source 1..1986: mol_type = other DNA
atgaagagttgcgcagtttctctgacaactgcggccgtggccttcggggacgaagccaagaaaatggctgaggggaaggcctccagggaaagtgaagaggagtcagtgagtctgacggtggaggaaagggaagcactgggcgggatggatagccggttgttcggtttcgtaaggctgcatgaggatggcgcacggactaaaaccctcctcggcaaagcagtgcgctgctatgaatcactgatattgaaggctgagggtaaggtcgagtcagatttcttttgccagctcgggcacttcaatctgctgctggaggactatagcaaggccttgtccgcctatcagagatactactcactgcaagccgattattggaagaatgctgcgttcctgtacggtctcgggctcgtgtacttttactataatgctttccactgggccattaaggcattccaggatgtcttgtatgtcgacccgtccttctgccgcgcaaaggaaatccacctcagattggggttgatgttcaaggtgaataccgactataaatcctccctgaaacactttcaacttgcactcatcgactgtaatccgtgtactctgtctaatgcagagatccagttccacatagctcatctctatgaaacacagcggaagtatcacagcgccaaagaagcgtacgagcagctgttgcagacggaaaacctgcccgctcaggtgaaggcaaccgtgctgcaacagctggggtggatgcaccacaatatggatttggttggagacaaagccactaaggagagctatgctatccagtacctgcagaaatccctggaagcggacccgaatagcggtcaaagctggtactttcttggtcgatgttatagctccatcggcaaagttcaagatgcctttatttcttaccgccaatccatagacaagagcgaggcctctgccgacacctggtgttcaatcggggtcctttatcagcagcagaaccagccgatggacgcacttcaggcatatatatgcgctgtccaactggatcacggtcacgctgccgcatggatggatttgggaaccctctacgagtcatgtaaccagccgcaggacgccataaagtgctacctgaatgctgctagaagcaagcggtgtagtaacacttccacgctggctgcccggattaagtttctccaaaatgggtctgacaactggaacgggggtcagagcctgtcacaccatccggtccaacaggtgtactccctgtgcctgacccctcagaagctccaacatttggagcagctccgagctaatcgggacaacctcaaccctgctcaaaagcaccaacttgagcagctggagagccagtttgtccttatgcaacaaatgcggcataaagaggtggcccaggtccgcacgactggaatccacaatggcgccatcaccgacagcagtcttccaaccaatagtgtgagcaaccggcagccccatggagcactcaccagagtgagttcagtctcccaacccggcgtacggcccgcatgcgtcgaaaagctgttgtccagtggcgctttttctgctggatgcatcccatgtgggaccagcaaaatactgggttcaaccgacacgatcctgctgggaagcaattgcattgcaggatccgaaagcaacggcaacgtgccatacctgcagcagaatacacataccctgccacataaccacacagatctgaatagcagcacggaggagccatggagaaaacagctgagcaacagcgcacaggggctgcacaaatcacaatcaagctgtctgtctggccccaacgaggagcagcctttgttctctacaggctccgcacaataccaccaggcaaccagcacagggataaaaaaggccaacgaacacctgacccttccatccaactccgtgcctcaaggagacgctgacagccatctgagttgtcacaccgccaccagcggcgggcaacaaggtatttaa

SEQ ID NO: 505 - DNA, 2061 bp, synthetic construct
  source 1..2061: mol_type = other DNA
atgtttactaaggaaagtaagccatcaaaaaaccggtctttggtccctgagacctcccgccacactggcgacacctcaaatggctgtgcagatgtgaaggggctgtctaaccacgtgcaccagctgatagccgatgcggtatcctcaccgaaccacggagattctcctaatttgttgatcgccgataacccgcagctgtcagcgttgcttatcggcaaggccaacggaaacgtagggacaggaacgtgtgacaaggtgaacaatattcaccccgcagtccacacaaagaccgaccattccgtggcatccagcccaagcagcgcgatctcaaccgccacaccctctcccaagtctacagagcaacgctcaatcaattcagttacctccctcaactctcctcactcaggccttcacaccgtgaatggcgagggactgggaaaatcacagagttccactaaggtggacctgccactggcttcacacagaagcactagccaaatcctcccatctatgtctgttagtatatgtccttccagcacagaggtgctgaaagcatgtcgcaatcctggtaaaaatgggctgtcaaactcttgcatcctgttggacaaatgccctcctcctcggccgcctaccagcccttatccaccactccccaaggacaaactgaaccctcctacgcccagcatctaccttgaaaataagagggacgctttcttcccaccgctccaccaattctgcacgaatcctaaaaatccagtgaccgtcatccggggactggcgggagcactgaagttggacctgggtctcttctctaccaagaccctcgtggaggctaataacgagcatatggttgaggtgcgcacccagctgctgcagccggctgacgaaaattgggaccccaccgggaccaagaaaatctggcgctgtgagagtaatcgctctcatactaccatagcgaagtatgcccagtaccaagcaagttcatttcaggagtccctgcgagaagaaaatgaaaaaagaacacagcacaaagatcactccgataatgagtccaccagtagcgagaatagcggccggcgccgaaaaggccccttcaagaccatcaagttcgggactaacattgatctgtccgataacaagaagtggaagctgcagctgcacgagcttaccaagctccctgcgtttgcccgcgtggtgagtgctgggaacctcctcacacacgtgggccacacaatactggggatgaacacagtgcagctgtatatgaaggtgccggggtccagaactcccggacaccaagagaacaacaatttctgtagtgtcaatattaacattggccccggtgactgcgaatggtttgtggttccagaggattactggggtgttctcaatgatttttgcgagaagaacaatctcaattttctgatgagcagttggtggcctaaccttgaggatctttacgaggctaacgtccccgtgtacagattcattcagcgaccgggggacctggtgtggattaatgcaggtacagtgcactgggtccaggcggtggggtggtgtaataatatagcttggaacgtcggccccttgacagcatgccagtacaaactcgcggtcgagcgctacgaatggaataagttgaagtcagtgaaaagcccagtccctatggtgcacctgagttggaatatggcacggaacattaaagtgagcgacccgaaattgtttgaaatgattaaatactgtttgctgaaaatactgaagcagtaccagacccttcgggaagccctggtggccgccggcaaggaggtaatttggcatggacggacaaatgacgagccagcccactactgcagtatatgtgaggtggaagttttcaatctcctctttgtcacaaatgagagcaacactcaaaaaacctacatcgtgcattgccacgactgcgctcgcaagactagcaaatctctcgagaactttgtcgttctcgagcagtacaaaatggaggatctgatccaggtctatgaccagttcactttggctttgagcctttcctcaagcagctaa

SEQ ID NO: 506 - DNA, 2127 bp, synthetic construct
  source 1..2127: mol_type = other DNA
atggcctctgagtccgaaaccctgaaccccagcgctaggattatgactttctaccctaccatggaggaattccggaactttagccggtacattgcgtatatcgaaagccaaggcgcacaccgggccggcctggccaaggttgtgcctcctaaagagtggaagccacgcgctagttatgacgacatcgacgatctggtcatcccggctcccatacagcagcttgttactggacagagtggtttgtttactcagtataatattcagaagaaggccatgacagtgagggagtttcgaaaaattgccaattctgacaaatattgtaccccaagatactccgagttcgaggaactggagcgcaagtactggaagaatctgacttttaacccccctatctatggtgctgacgtaaacggcacactgtatgagaagcacgtggacgaatggaatattggaagactcaggaccatcctggatctggttgaaaaagaatcagggatcaccatcgaaggagtgaataccccatatctgtactttggaatgtggaagacttctttcgcatggcacaccgaggacatggacctgtattccatcaattatttgcatttcggggagcccaagtcctggtattccgtgccccccgagcatggcaagcgcctcgaaaggctggccaagggtttctttcccgggtctgctcaatcatgtgaagctttccttcgccataagatgaccttgatctcccctctgatgctgaaaaaatatgggattccctttgataaggttacccaggaagccggcgagttcatgatcacatttccatatggctatcatgccggttttaaccacgggtttaactgtgcggagagcacaaactttgcaactcggcgatggattgaatatggtaagcaggctgtgctgtgtagctgtcgaaaagatatggtgaaaataagcatggatgtgtttgtacgaaagtttcagcctgaacgatacaagctttggaaggctgggaaggacaacacagtcatcgaccacaccctccctactcccgaggctgccgaattcctgaaggaatcagaactgcctcccagagccgggaatgaagaggaatgtcccgaagaggatatggagggcgtcgaagacggggaggagggtgatcttaaaacctcactggctaaacatagaattggaacaaaacgccatagagtgtgtctcgagatcccacaggaggtctcacaatcagaattgtttccaaaggaggatctgtcctctgagcagtatgaaatgacagaatgtcccgccgccttggccccggtaaggcctacccatagcagcgtacggcaggtggaggatggactgacttttccggactactctgattctacggaagttaagttcgaggagctgaagaatgttaaactcgaggaagaagacgaagaggaggagcaggccgcggcagccctggacttgagcgtcaatccggcatcagtgggtggtcgcctggtgttttctggatcaaagaagaagagtagcagctcactgggcagtggcagttctagggactcaatctcttccgatagcgagactagcgagcccctctcatgtcgggcccaaggccagaccggagtgttgacggtgcatagttacgccaagggggacgggcgcgtgacagtgggtgagccttgcacacgaaagaagggaagcgcagctcgatcctttagtgaaagggaacttgctgaagtggctgacgagtacatgttttcccttgaggaaaataaaaagagcaaggggaggcgccagccactcagcaaactcccccgacaccatccacttgttctccaggagtgcgtctcagacgacgaaaccagcgaacagctgactcctgaggaggaagcagaagagacggaagcttgggctaaaccactcagccagctttggcagaacaggccccctaattttgaggctgagaaggaattcaacgaaaccatggcacagcaggctcctcactgcgcagtctgcatgatcttccagacctatcatcaggtagagtttgggggctttaatcaaaactgcggaaatgccagcgacctcgccccacagaaacagagaaccaagcccctgatacctgagtaa

SEQ ID NO: 507 - DNA, 2103 bp, synthetic construct
  source 1..2103: mol_type = other DNA
atggacttcagtttctcattcatgcaaggtatcatgggcaataccattcagcagccaccacagctcattgacagtgcaaatataagacaggaggatgcctttgataataattctgacatagccgaagacggcgggcagaccccttacgaggccacactgcagcaaggctttcagtatcccgcaaccactgaggatctccctccactgactaacgggtacccttcttctatttcagtctacgagacccagactaagtatcagtcctataatcagtatccaaacggctccgccaatggtttcggtgccgttcggaacttctctcctactgactactaccatagcgagattcctaataccaggcctcacgagattctggagaaaccaagccccccccagcctccacctcccccgagcgtcccgcagacagtcatccccaagaagactggaagcccggagatcaagctgaaaatcacaaagaccatccagaacggtcgcgagctgttcgaatcaagtctgtgcggtgacctcctgaatgaagtgcaggcatccgagcatacgaagtctaagcacgaatctcgaaaagaaaagcgaaagaagtctaacaaacacgacagcagtagatccgaagagaggaagtcccataagatacccaaactggagcctgaagaacagaaccgcccaaatgagagagtggacactgtgtctgagaaaccaagagaagagcccgtgctgaaagaggaggccccagtgcagccgatcctttcatcagtgccaacaacggaggtgtcaacaggcgtgaaatttcaagttggcgacctggtctggtctaaggtcgggacctatccttggtggccttgtatggtctcttccgatccgcagcttgaggtccacaccaagatcaacacacgaggcgctcgagaatatcatgtgcagtttttttctaaccagcctgaaagagcctgggtgcacgagaaaagagtccgcgaatacaaaggacacaagcaatacgaggaactgctggctgaggctacaaaacaggcctctaaccattccgagaaacagaaaatcagaaagcctcgcccccaaagagaaagagcacagtgggatatagggatcgcccacgccgaaaaagcacttaagatgacgagggaagaaagaattgaacaatacaccttcatctatattgacaagcagccagaagaagcgctgtcccaggccaaaaagtccgtggcttcaaaaacagaggtcaaaaagacgaggcgccccagaagtgtgctcaatacccaacctgagcaaactaatgccggggaggttgcgagctccttgagttctacagaaataaggaggcactcacagagacggcacaccagcgctgaggaagaggagccacccccagtaaagattgcctggaaaaccgcagctgctaggaaatccctgcccgcatccatcactatgcataaaggcagtctggatctccaaaagtgcaacatgagccccgtcgtcaagattgagcaggtcttcgcactgcagaatgccactggcgacggaaagttcatcgaccagttcgtgtatagtaccaaaggcatcggaaataaaaccgagattagcgtgagaggacaggacaggcttatcatttccacacccaaccagcgaaatgaaaaacctacacagagcgtcagttctcccgaggctacaagtgggagcaccggtagtgttgaaaagaaacagcaaagacgctccattcggacgcgcagtgaaagcgagaaaagtaccgaggtggtgccaaaaaagaaaattaaaaaagagcaggtggagaccgtgcctcaggctacagtgaaaacaggcttgcagaaaggggcttccgagatatcagacagttgcaaacccttgaagaagaggtctcgggcctccacagatgtggaaatgacaagtagcgcttatagagacactagcgactccgacagccgcggcctcagtgacctccaagtgggctttggcaaacaggtcgattccccatccgccaccgctgacgccgatgtttcagatgtgcaatctatggatagctctcttagcagacgcgggacaggtatgtcaaaaaaataa

SEQ ID NO: 508 - DNA, 1449 bp, synthetic construct
  source 1..1449: mol_type = other DNA
aagaagttgcattataaacagatcgtctgggtcaaattgggcaattataggtggtggccagctgaaatctgcaaccccaggtccgtcccccttaacattcaagggctcaaacatgacttgggagatttcccggtcttctttttcgggtcacatgactattattgggtgcatcagggccgggttttcccctacgtcgagggagataaatccttcgccgagggtcagacctccatcaataaaacgtttaagaaggccctggaggaggcggccaagcggttccaggagctgaaggctcagagagagagcaaggaggcactggagattgagaaaaatagtaggaagccccccccatacaagcacataaaagctaataaagtgatcggaaaagtgcagatacaagtcgctgatctgagcgagattcctcggtgtaactgcaagcctgccgacgagaatccctgcggtctggagagcgaatgccttaataggatgctgcagtacgagtgtcatccccaggtttgtcctgccggagaccgctgccagaatcagtgtttcaccaaacggctgtacccagacgcggaaattatcaagacagagcggcgaggttggggactgcggacaaagcggagcattaaaaagggagagttcgttaacgagtatgtgggagagctcattgatgaagaagaatgccgccttcgcattaaacgagcacacgagaactccgttactaacttctacatgttgacagtgacaaaggacagaatcatcgacgcgggtccaaaaggaaactacagtaggtttatgaatcactcctgcaaccctaattgtgagacacaaaaatggaccgttaatggagacgtaagggtgggcttgttcgcactttgtgatattccagccgggatggagctcacatttaactacaatttggattgcctggggaatggccgaaccgagtgccattgcggggctgataactgcagcggattccttggagtcagacctaagtctgcttgcgcatcaactaacgaagaaaaggctaaaaacgctaaactgaaacagaaacggagaaagatcaagaccgaacccaaacagatgcatgaagattactgcttccagtgcggagacggcggggaattggtgatgtgcgacaagaaggactgccctaaagcgtatcatcttctctgcctcaacctcacacagcccccctatggaaagtgggaatgtccttggcatcagtgcgacgagtgctcttcagcagctgtgagcttctgcgaattttgccctcattcattttgtaaagatcatgagaagggtgccctggttcctagcgccctggaggggcggctgtgctgttcagagcacgaccccatggcccccgtgagccctgagtactggtcaaaaatcaaatgtaaatgggagtctcaggaccatggcgaggaggttaaggagtaa

SEQ ID NO: 509 - DNA, 672 bp, synthetic construct
  source 1..672: mol_type = other DNA
aagagactgctcccttctgtgtggagtgagtctgaagatggcgctggttccccacccccctatcgcaggaggaagaggccaagttctgccaggcgccaccacctgggacccacacttaaacccacactggctacgcgaacagctcaacctgatcatactcaggcccccacaaagcaggaggccggtgggggcttcgtcctccccccgcccgggactgacctggtgttcctgagggaaggcgctagctctcccgtccaagtccccggcccagtcgccgcgtccacagaagctctgttgcaagaggcacaatgttcagggcttagttgggtggtggccctgcctcaggtgaagcaggaaaaagcggatacacaggatgagtggaccccgggcactgccgtgctcacaagccctgtgctcgtgcccggatgcccatctaaggcggtggatcctgggctgcccagtgtaaagcaagaaccccccgaccctgaagaggataaagaggagaataaagatgatagcgcctccaagcttgcccctgaagaggaggcgggaggtgcaggaactccagttattactgaaatattttccctgggcggaacacggtttcgcgacacagctgtgtggcttcctaggagtaaggacctgaaaaagcccggagcaaggaaacagtaa

SEQ ID NO: 510 - DNA, 1044 bp, synthetic construct
  source 1..1044: mol_type = other DNA
atgcttcacacaactcagctgtaccagcacgtaccagaaacgcgatggcccattgtgtattcaccacggtataacattacctttatggggctggaaaaactccacccattcgacgccggtaagtggggaaaggtgatcaacttccttaaggaggagaaactcctgtcagattccatgctggtcgaagctcgcgaggccagcgaggaggacctgctcgtcgtgcacactcgccggtatttgaacgagctgaagtggtcatttgccgtcgccacaatcacggagattcccccagtgatatttctgccgaattttctggtacaacggaaggtcctgagacccctcagaacccagactgggggcaccatcatggctggcaaactcgccgtggagagaggatgggcgattaatgtcggcgggggctttcaccactgttcttcagatagaggagggggcttctgcgcatacgccgacataactctggccatcaagttcctgtttgagagggtggaaggtatctctagagctacaataattgatctggatgcccaccaggggaacggacatgagcgggattttatggacgacaagagggtttatattatggatgtgtacaatcgccacatataccctggtgatcggtttgccaagcaagctatcaggcggaaggtcgaactcgagtggggcacagaagatgacgagtacctggacaaagttgagagaaatataaagaagtctttgcaggaacatctgcccgatgtcgtggtctacaacgccggaaccgacatcctggaaggagatagattgggaggacttagcattagccctgctggaatagtgaagagggatgagcttgtctttagaatggtgcgagggcgcagggtgccaattctcatggtgacctctgggggataccagaagaggaccgcccggatcatcgctgacagcatcctcaacctgtttggcttgggtcttataggtcccgagagccccagcgtgtccgcacaaaatagcgacacgccattgcttcccccagccgtgccttaa

SEQ ID NO: 511 - DNA, 1203 bp, synthetic construct
  source 1..1203: mol_type = other DNA
atggccgccggcggcctgagccggagcgaaaggaaggccgccgaaagagtcaggcggctgcgagaggagcagcagcgcgagcgcctgaggcaggtctcccgcattctgcgcaaggccgctgccgagcgctcagctgaggaggggaggctgttggccgaatccgcagacctcgttacggagttgcaaggtaggagcagacggagggagggccttaaaaggcgacaggaggaagtatgcgacgatccagaggaactccgaggaaaggtgagggagctcgctagtgccgtgcgaaacgcgaaataccttgtcgtgtacactggtgcaggcatctccactgcagccagcattcccgactatcgggggcctaatggggtttggactctccttcaaaagggacgctccgtcagcgctgcagatctctcagaggccgagcccacactgacgcacatgagcataacccggctccacgagcaaaagctggtgcagcatgtcgtgagccagaattgtgatgggctgcacctgcggagtggcttgccgcgaaccgccatcagcgagcttcacggcaacatgtatatcgaggtctgtacgtcttgtgtgccgaatagggaatatgtgcgggtcttcgacgttaccgaacgcaccgctctccaccggcatcaaacagggcggacatgccacaaatgtggaacccaactgagggacaccatagtgcatttcggtgaacggggtacattgggacagcctcttaactgggaagccgccactgaggctgcatcacgagcagacacgatcttgtgtcttgggagcagcctgaaggttctcaagaagtacccacgactgtggtgtatgacgaaaccacctagccggcgacccaaattgtatatcgtcaatctccagtggacaccaaaggatgactgggcagcccttaagcttcacggcaaatgcgacgatgttatgagactcctgatggcggaactcggtctggagatccccgcgtattctaggtggcaagacccaatcttctcattggcaactccccttcgggcaggagaagagggatcacatagtcgcaagtcactgtgtagaagccgagaagaagcaccgcctggagatcgcggcgcccctctcagtagcgcaccaatcctcgggggctggttcggccgaggctgcacaaaacgcacaaaacgaaaaaaggtcacataa

SEQ ID NO: 512 - DNA, 1623 bp, synthetic construct
  source 1..1623: mol_type = other DNA
atggcatcccaggaattcgaagtagaggcaattgttgacaagaggcaggacaagaacgggaatactcaatacctggttagatggaagggctacgataagcaggacgacacctgggaacccgaacagcatctgatgaattgcgagaagtgtgtgcacgactttaacaggagacagactgaaaagcaaaaaaaattgacctggaccaccacttctcgaattttttcaaataacgcacgccggcgaacatctaggagtacaaaggcgaattacagcaaaaattctcctaagacgccggttactgataagcaccaccggtctaagaaccgaaagctgtttgctgccagcaagaacgttaggcgcaaggcagccagtattctctcagatacgaagaacatggagattataaattccaccatcgaaacgctggccccagatagtccattcgaccacaagactgtgagtggcttccagaagctggaaaagctggacccaattgctgcagatcagcaagataccgtggtcttcaaggtaactgagggcaaactgttgcgcgatccactgtcacgccccggcgccgagcaaactgggatccagaataagactcagatccacccactgatgtcacagatgagcggcagcgtgactgcctccatggctactggatccgcaactcgaaagggaatagtagtgttgattgatccactcgctgccaacggtacgactgatatgcacacttccgtcccacgggtgaaagggggtcagaggaatatcacagatgactctcgagaccaaccatttatcaagaaaatgcattttaccatccgacttacagagtccgctagcacatacagagacatcgtagttaagaaggaggacggattcactcaaatcgtgctctctacacggtcaacagagaaaaacgccctcaacaccgaggtgataaaggaaatcgtaaatgccctgaattccgctgcagcagacgatagcaagctggtgctctttagcgcagctgggagtgtattttgctgcggcctcgattttggctactttgtcaaacacttgcgcaataacagaaacactgctagcttggagatggtagacacgattaagaatttcgtcaacactttcattcagtttaagaagcccatcgtggtgagtgtcaatggcccagccatcggattgggcgcttctattctcccactgtgtgacctggtatgggctaacgaaaaggcttggtttcagaccccatacaccacgttcgggcagtccccggatggctgtagctccataaccttcccaaagatgatgggcaaggcctctgccaacgaaatgcttatcgccggccgaaagttgacggctcgggaggcttgtgcaaagggcctcgtatctcaagtgtttctcacgggaacattcacacaggaggttatgattcaaatcaaagagcttgcctcttataacccaattgtgcttgaggaatgcaaagcactcgtgcggtgtaatattaagctggagcttgagcaggctaatgaaagagagtgtgaagtattgcggaaaatctggtcctctgcacagggcattgaaagcatgctgaaatatgttgagaataaaatcgacgagttttaa

SEQ ID NO: 513 - DNA, 1179 bp, synthetic construct
  source 1..1179: mol_type = other DNA
tgcaaggtgagagcccagtcacgggacaaacagatcgaagaacgcatgctgtcccacaggcaggatgacaataataggcatgctacacgacaccaggcaccaacggagagacagctgagatataaagagaaagtggccgagctgaggaaaaagaggaattctggcctttcaaaagaacagaaagagaaatatatggagcaccggcagacctatggaaacacacgggagccactgttggaaaatctgacgtctgaatacgacctggacctttttcgccgcgcccaagcccgggcctccgaggatttggagaagctgaggctgcaggggcaaatcactgagggatctaacatgattaagaccatcgcctttggtcgctacgaactggacacctggtaccacagcccatatccagaggaatacgctcggctgggtcggctgtatatgtgcgagttctgtttgaaatacatgaagtcccaaaccatcttgcggagacatatggccaaatgtgtatggaagcatcctcctggagacgaaatatacagaaaaggctccattagtgtcttcgaggttgatggcaaaaaaaataaaatctactgccagaatttgtgtctgcttgctaagctgttcctggaccacaaaaccctgtactacgatgtggaaccctttctcttctacgtcatgactgaggctgacaatacaggatgtcatttgatcggatacttctcaaaggagaagaactctttccttaactataacgtttcctgcattctcactatgcctcagtacatgagacaggggtacggtaagatgctgatcgatttctcctacctcttgtcaaaggttgaagaaaaagttggatctcccgagagaccgctctctgacctcgggttgatcagttacagatcttactggaaggaagtcctgctgcggtacctgcacaacttccaagggaaggagatctcaatcaaggaaatctcacaggaaaccgccgtgaaccctgttgacatcgtttctaccctccaggctctgcagatgttgaagtactggaagggtaagcaccttgtgctgaagagacaggatctgatcgatgaatggatcgccaaggaagccaaacgatcaaattccaacaaaaccatggaccctagctgcctgaagtggacaccaccgaagggcacataa

SEQ ID NO: 514 - DNA, 1359 bp, synthetic construct
  source 1..1359: mol_type = other DNA
atggagtttagtataaaacagtcaccactgtctgtgcagtcagtagtcaaatgtataaaaatgaagcaagcgccagaaattttgggaagtgctaatggcaagacaccaagctgcgaagtgaatagagagtgttccgtgtttctgagcaaggcccaactctccagcagccttcaagaaggagttatgcaaaagttcaatggtcacgatgccctgccttttattccagcggacaagctgaaggatctgacaagccgagtctttaacggggagccaggcgctcatgatgccaaactcagattcgagagccaagagatgaaaggtattggcactccaccgaacacaactcccattaaaaacggaagccccgagataaagctgaagataaccaagacttacatgaatggaaagcctctgttcgagagtagcatttgcggagattccgcggccgatgtctcacagtctgaagaaaatgggcagaagccagagaataaggcaaggcgcaaccgaaaacggtcaatcaagtatgactctctgctcgagcagggtctggtggaggctgctctggtttccaagataagttctccatcagacaaaaaaatacctgcaaagaaggagagctgccctaacaccggaagagataaggaccatcttttgaagtacaacgtcggggatttggtttggtcaaaagtgagtggatacccgtggtggccctgcatggtgagcgccgacccgctcctgcactcctacacaaagctcaagggtcagaagaagagcgcgcgccagtaccacgtccagttttttggcgatgctcctgagcgagcttggatatttgaaaaaagtctcgtggccttcgaaggagaaggccagtttgagaaattgtgccaagaaagcgccaaacaggctcccacaaaagccgaaaagatcaagctgctgaaacctatctccgggaagctgagagctcagtgggagatgggaattgtgcaggccgaggaagccgcatccatgtctgtggaggaacgaaaagctaagttcacattcctttatgtgggcgaccagcttcatctcaacccacaggtggcaaaagaggcaggcatcgccgccgaatccttgggggaaatggccgaatcctcaggtgtgtcagaggaagctgccgagaaccctaaatccgtgcgggaggaatgtatccctatgaagcggcgacgacgggcaaagctgtgttcctctgctgagaccctggagtcccaccctgacatcggaaagtccactcctcagaaaactgctgaggcagatcccaggcggggtgtggggtcacccccgggacgcaagaaaacgacagtctcaatgcctagatcaagataa

SEQ ID NO: 515 - DNA, 1473 bp, synthetic construct
  source 1..1473: mol_type = other DNA
aagaaactgcatttccaggatataatctgggtgaagttgggtaactacagatggtggcctgcggaggtatgtcatcccaagaatgtgccccccaacattcagaagatgaagcacgagatcggcgagttccccgttttcttctttggctcaaaggattactattggacgcaccaggctcgggtctttccttacatggagggagatcgaggatcacgctaccagggggtgcggggtattggtagggttttcaaaaacgctctgcaagaggcagaggctcggtttagagagattaagctgcagagggaggctagagaaacacaagagtctgagcgcaagccacctccgtacaaacacataaaagtaaataaaccatatggaaaggtgcaaatctataccgccgacatctccgagattccaaagtgcaactgcaaaccaacagatgagaatccttgtggattcgacagcgaatgtctgaaccggatgctgatgttcgaatgtcacccacaagtgtgtcctgctggggaattctgccaaaatcagtgcttcacaaaacgccagtacccagagaccaaaatcatcaaaactgacggaaagggctggggcctcgtcgccaagcgcgacatccgcaaaggggagttcgtcaacgagtatgtcggcgagcttattgatgaggaggagtgtatggcccggattaaacatgctcacgagaacgacattacccatttctacatgcttacgatcgataaagacagaattattgacgctggccccaagggcaattatagcaggttcatgaatcattcatgccagcctaactgtgaaacactcaagtggaccgtgaatggagacacacgcgtgggactcttcgctgtgtgtgatatcccggccggaacagaactgacatttaactacaacctggactgcctgggcaacgaaaagacagtgtgtagatgcggggcttccaattgctcaggcttcctgggcgataggcccaaaaccagtactaccctcagcagtgaggaaaaaggtaaaaagaccaagaaaaagacgaggcggcgcagagccaaaggcgagggcaagcggcagtcagaggacgaatgtttccggtgcggggatggcggacaactggtgttgtgcgaccgcaagttctgcactaaggcttatcatctgtcctgcttggggttgggcaagagacccttcgggaaatgggaatgcccttggcaccattgtgatgtctgcggtaagccttctaccagtttttgtcatctgtgtccaaacagcttctgtaaagaacaccaggatgggaccgccttttcttgcaccccagatggccggagttattgttgcgagcacgacctgggagctgccagtgtgaggagcactaagacggagaaacccccacctgagcccggcaagcctaaagggaagcggagacggagaaggggttggagaagagtgaccgagggtaaataa

SEQ ID NO: 516 - DNA, 2247 bp, synthetic construct
  source 1..2247: mol_type = other DNA
atgagcactcccgatcctcccctcggtggaactccgcggcctggccccagtccagggccagggcctagtcccggtgcaatgctgggcccttctcctggtccttccccaggtagcgcccattcaatgatgggcccaagccctggaccaccgtccgccggccaccctatcccaacacagggccccggtggttacccccaggacaacatgcaccagatgcacaaaccaatggaaagcatgcacgagaaaggcatgtcagatgacccaagatataaccagatgaaggggatgggaatgcggtccggagggcacgctggcatgggcccaccccctagccctatggatcaacatagtcagggatatcctagccctctgggaggctcagagcacgccagtagtcccgtgcccgcttctggcccatcatccggtccccaaatgtccagcgggcccggtggcgccccattggacggagcggacccacaggccctggggcagcagaatagaggtccgaccccctttaaccagaaccagttgcatcaactgagggcgcaaatcatggcatataaaatgctggctaggggacagccacttcctgaccatctccagatggccgtgcaggggaagcgacctatgcctgggatgcagcaacagatgccaaccctccctcccccaagcgtgtccgccactggaccaggtccaggacctgggccgggcccaggccctggaccagggcctgctccacctaattacagccggccgcatggcatgggaggcccaaacatgcccccccccggccctagcggcgtgccgccgggcatgccaggacagccgcctgggggaccgcccaagccatggcctgagggtcccatggctaacgcagccgctccaacaagcactccccagaaactgatccctccacaacccacaggaagaccgtcaccggctccacctgctgtgccacccgcagcaagcccagtcatgcctccacaaacccagtctccgggacagcctgcccagcccgccccaatggtgccactgcatcagaagcagagccgaatcacaccaatccagaaaccgcgggggctggacccagtggaaattctgcaggaaagggagtatcgactccaagctcgaatcgcacatcggattcaggagctggagaacctgcctggttccctcgccggcgacttgcgcaccaaagctaccattgagcttaaagctctcaggttgctcaattttcagcgccagctccggcaggaagtcgtggtttgcatgcggagagacactgccttggaaaccgcactgaatgcaaaggcctacaaacgctccaagcgccagagtctcagagaggctagaattacagaaaaattggaaaaacagcagaagatcgagcaggagcgaaagagacggcaaaaacaccaggagtaccttaattccatactgcagcacgctaaggatttcaaagaataccatagaagcgtgaccggcaagatccagaagttgaccaaagccgttgccacgtatcacgcaaacaccgagagagagcagaaaaaggagaatgagcgcattgaaaaagagagaatgcggcggttgatggccgaagacgaagaggggtacagaaagctgatcgaccagaagaaggacaagagactggcttatttgctgcagcagaccgatgagtatgtagcaaatctcaccgagctggtgcgccaacacaaagcggcacaagttgcaaaagaaaagaaaaagaaaaaaaagaaaaaaaaggcggagaacgccgagggccagaccccggcgattgggcctgacggtgagccattggacgaaacctcacaaatgtccgatttgcctgtgaaggttatccatgtcgagagtggtaagattcttaccggcaccgatgctcctaaggctggacaactcgaagcctggctggaaatgaatcccgggtacgaggtcgccccaaggtctgatagcgaagaatctggtagcgaagaagaagaggaagaggaggaggaggaacagccgcaggccgcacagcctcccacgctgcccgtggaagaaaagaagaagatacccgatccagacagcgacgacgtcagtgaagtagacgcacgccacatcattgagaatgcaaaacaggacgttgatgatgagtatggcgtgagccaggccttggccagggggctgcagtcctattatgcagtcgcacatgccgtaaccgagagggtcgacaaacagtccgcactctaa

SEQ ID NO: 517 - DNA, 2700 bp, synthetic construct
  source 1..2700: mol_type = other DNA
atggtgaatggggtgctcaagcaatatcagattaaaggtctggaatggctggtgtccttgtataacaacaacttgaacgggattcttgcggacgagatgggcctcggcaagactattcagactatcgcgctgattacctacctcatggaacacaaaagaattaacgggccattcttgatcatagtcccactgagtactctctcaaattgggcgtacgaatttgataagtgggcacccagcgtcgtgaaggtctcatataagggaagccccgctgcccgccgcgccttcgtaccacagctgagaagtgggaaatttaatgtcttgttgaccacttacgaatatataataaaagataagcacatactggccaaaatccgctggaagtacatgatcgtggacgaagggcacagaatgaagaaccatcattgtaagctgacgcaggtcctcaacacacactacgttgctccgcgaagactgctgctcactggcacaccactgcagaataagctgcctgaactgtgggccctgttgaactttctgctcccaaccatctttaagtcatgttcaacttttgaacaatggtttaacgctccgtttgctatgacaggcgagaaagtggacctgaatgaggaggagaccattctcatcatccgacgcctgcacaaggtccttcggcccttccttttgaggcggctgaagaaggaagtggaggctcaacttcccgaaaaagtcgaatacgtgatcaaatgtgatatgtctgcgctgcagcgggtgctctacaggcacatgcaggcaaaaggagttctcctgacggacggatctgagaaagacaaaaagggcaaaggagggactaagactctgatgaatacaatcatgcagctgaggaagatctgtaatcatccatacatgttccagcatatcgaggaaagcttcagtgagcatctcgggtttactggaggaattgttcaaggtcttgatctgtatcgggctagcgggaagttcgaattgctcgatagaatcctcccaaaactccgagctaccaaccacaaggtgctgctgttttgccagatgacttccctgatgactatcatggaagactacttcgcctatagaggattcaagtatctgcgattggacgggaccaccaaagccgaggatcggggaatgctgctgaagacatttaatgagcctggtagtgagtatttcatctttctgttgtctaccagagcaggaggcctgggcttgaatctgcagagtgccgacacggtgatcatctttgattctgactggaacccccaccaggatttgcaggctcaagaccgcgctcatcgaatcgggcagcaaaacgaagtcagggttctccggctttgcacggttaattccgtggaagaaaagatcctggccgccgccaagtataagctgaatgtagaccaaaaggtgatccaggctgggatgttcgaccagaaatctagttcccacgaacgccgggcctttctgcaggccatattggagcatgaggagcaagatgagtcccgccactgctctaccggttcagggagcgcctcatttgctcatacggccccgccgcctgcaggagtgaacccagacctggaggagcctcctctgaaggaggaagacgaagtccccgatgatgagaccgtcaaccagatgatcgcccggcacgaggaagaattcgatctttttatgaggatggatcttgaccggcgaagagaggaggcaaggaaccccaagagaaaacctcgactgatggaggaagatgagctgccgagctggattatcaaggacgatgcggaggtcgaacgcctgacctgtgaagaggaagaggaaaagatgttcggacgggggagccgccacagaaaggaagtggactactcagactcccttaccgagaaacaatggctgaaagccatcgaggaaggtactctggaggagatcgaagaggaggtcaggcaaaaaaaatccagtcggaaaaggaagcgagacagcgacgctggatccagtacccccacaaccagtactaggtctcgcgacaaagatgatgagagcaagaagcagaagaagcgcgggagaccacctgccgagaaactgagcccgaaccccccaaacctgacaaaaaagatgaagaaaatcgtagacgcagtaatcaaatataaagactctagctccggtagacagctgagcgaggtcttcattcaattgccaagcagaaaggagctccccgaatactacgagcttataaggaagcctgtggatttcaagaagattaaagagaggatccgaaatcacaaataccggagtctgaatgaccttgagaaagacgtgatgctcctgtgtcagaatgcacaaactttcaacctggagggcagcctgatctacgaagatagtatcgttcttcagagtgtgttcacctctgtgcgccagaagatagagaaagaggacgattctgaaggagaagagtccgaggaagaagaggaaggggaggaggaaggctctgaaagcgaatctagaagtgtgaaagttaagattaagctcggcaggaaagagaaagcacaagaccggctcaaaggcggtagaaggagaccaagccggggcagccgagccaaacctgtcgtttcagatgatgactctgaagaagaacaggaagaggataggtccggaagcgggagtgaggaggattaa

SEQ ID NO: 518 - DNA, 1782 bp, synthetic construct
  source 1..1782: mol_type = other DNA
atgtcatcactcccaggatgtatcggcttggatgctgccactgcaacagtggaatctgaggaaattgctgaactgcagcaggccgtggttgaagagctgggaatctctatggaggagttgcggcatttcatagacgaggaactggaaaagatggactgtgtccaacagcgcaagaaacagctggccgagctcgaaacctgggttatccagaaggaatccgaggtggcacacgtggaccagctcttcgatgacgcatccagggcagtgacgaattgcgaaagcctggtgaaagatttttattccaagcttggtctccagtatcgcgactcaagcagcgaggacgagtcttctaggcctaccgagattattgagattcctgatgaggatgacgacgtgctctctatcgactccggtgacgctggaagtcgcactcccaaggaccagaaactgagggaggccatggccgctcttaggaaatcagcacaggacgtccaaaagtttatggacgccgtcaacaaaaaaagctcttcccaggatctccataaaggtaccctctctcagatgtccggggagctttctaaagatggggatttgatcgtttcaatgagaatcctgggcaaaaagcgcaccaagacctggcacaagggaacccttattgcaatacaaactgtgggccctggcaaaaagtataaggtgaaattcgacaataaggggaagtcactcttgtctggtaaccacatagcgtatgactaccatcctcccgccgataagctgtacgtgggtagcagagtggttgcaaaatataaggacggtaatcaggtctggctttatgcaggcatagttgccgagactcccaacgtgaagaacaagctgagatttctcatctttttcgacgacggctacgcttcatacgtcacacagagcgagctgtaccccatctgtcgcccgctcaagaaaacttgggaggacattgaagatatctcatgcagggattttatcgaagagtatgtaacggcttacccaaatcgcccgatggttctgttgaagagcgggcaactcataaagactgagtgggaggggacttggtggaagtctcgcgttgaggaagtggatgggtctctggtgaggattctctttctcgatgataagagatgcgagtggatctacagaggaagcactagattggagccaatgtttagcatgaaaacctccagcgcgtctgctctggaaaaaaagcagggacaactgaggaccaggccaaacatgggtgccgtgagaagcaaaggccccgtcgtgcagtatacccaggacctgaccggcaccggcactcagttcaagcccgtcgagccaccccagccaactgcccccccagccccacccttcccccccgctcctcctcttagtcctcaggccggcgactctgatctggagtcacagctcgcccagtcacgcaagcaggtggccaaaaaatccactagcttcagacccggctccgtgggttcaggccactcaagcccaacttccccagctctcagcgaaaacgtgagcggtggaaaacctggcataaaccaaacttacagatccccactgggaagcacagcatccgccccagctcccagtgccctgcctgcacctcctgcacctcctgtctttcacggaatgttggagcgcgccccggccgagcctagctacagagcgcccatggaaaagctgttctatctgccacatgtgtgttcctatacctgtctctctcgggtaagacctatgcgcaatgagcagtaa

SEQ ID NO: 519 - DNA, 1881 bp, synthetic construct
  source 1..1881: mol_type = other DNA
gtggatcgaaaatttcagccctataaacctttctactacattctcgacatcacctacgggaaggaggacgtacctctgagttgtgttaatgaaattgacactacccctcctccacaggttgcgtacagcaaagagcgcattccagggaagggggtattcatcaacacaggaccagagtttctggtgggctgcgactgtaaagatggatgtcgcgacaaatctaagtgcgcttgccatcagctgactatccaggctacggcttgtaccccgggaggccagattaatccgaactcaggatatcaatataagaggctggaagagtgcctgcccactggggtctatgagtgcaacaagcggtgtaagtgcgacccgaatatgtgtacaaataggctggtgcaacacggcctgcaggttcggctgcagctctttaaaactcaaaataagggctggggcatccggtgcctcgacgacattgctaaggggtcctttgtttgcatttatgctggcaaaattctcacagatgacttcgccgataaagaaggcctggagatgggagacgagtactttgccaacttggaccacatcgagagcgtggagaactttaaggaggggtatgagtccgatgccccatgcagctccgactcttcaggtgtggatctgaaggatcaggaggatggaaactccggaaccgaggacccagaggaatccaatgatgacagctccgacgacaatttttgcaaagacgaggacttcagtacttcaagcgtgtggaggagttacgcgacacggaggcagaccagaggccagaaggagaatggactgagtgaaaccacgagtaaggattcacatccacccgatctgggacccccacacattcccgtcccaccctctattccggtggggggctgtaatccgccctcctcagaagaaacccccaagaataaggtggcttcatggcttagctgtaattcagtcagtgagggaggtttcgcggatagcgacagccattccagtttcaagaccaacgagggcggagaagggcgcgctggaggaagcaggatggaggctgagaaagcatcaacgagcggcctgggcatcaaagatgaaggcgacatcaagcaggccaagaaggaggatacggatgatagaaataagatgtccgttgtgactgaatccagtcggaattatggatacaacccatctccagttaagcccgagggtctgcggagaccacccagcaagacatctatgcaccaaagcaggcgattgatggcgtcagctcaatcaaaccctgacgatgtgcttacccttagctctagcactgaatccgagggggaatccgggaccagtcgcaagcctaccgctggccagacctcagctacggctgtcgattcagatgatatacagaccatcagttccggatcagagggcgacgattttgaggataagaagaacatgacaggccccatgaagcggcaggtagccgtgaagtcaactcgaggatttgcactgaagtccacgcatggaatcgcgatcaagtcaacaaatatggcctcagtcgataaaggcgagtcagcccccgtgagaaaaaacacccgccagttctacgatggcgaagaatcctgttatattatagacgcaaaattggaaggaaacttgggcaggtacctcaatcattcctgtagccccaacctctttgtacagaatgtctttgtggatacgcacgatctcaggtttccctgggtagcattcttcgcatcaaaacggatacgagccggaactgagctgacttgggactacaactatgaagtcggcagcgttgagggcaaagaacttctgtgctgttgtggcgcaattgaatgtaggggccggcttctgtaa

SEQ ID NO: 520 - DNA, 1182 bp, synthetic construct
  source 1..1182: mol_type = other DNA
atgggcgaaggaggagctgcggccgccctggtcgccgccgcagctgccgccgctgccgctgccgcggccgtggttgcaggacagcggagacgacggctggggcgcagggcacgatgtcacggccctgggcgcgccgcaggagggaaaatgagcaaaccctgcgcagtggaggcggcggccgccgctgtggccgcgaccgcccctggccccgaaatggtggagagaaggggcccaggcagacctcgcactgacggggaaaacgtgttcaccggccaaagcaagatttattcctatatgagccccaacaaatgtagtggtatgcgatttccgctccaggaggagaattccgtcactcaccacgaggtgaaatgccaaggaaagcccctggcaggcatttacaggaaacgggaggaaaaacggaatgcagggaatgccgtgcggagcgcaatgaagtcagaagagcagaagattaaggatgctcggaaaggtcctctcgtcccctttcctaatcagaaatctgaggcggcggaaccccccaagacacctcctagctcctgcgatagcacaaacgctgctatcgcaaagcaggccctgaaaaagcccatcaaagggaagcaggcaccccggaagaaggcccagggcaagacccagcagaaccggaaactgaccgacttttacccagtcagaaggtccagccgaaagagtaaagctgagctccagtctgaggaaagaaaacgaatagacgagctgattgagagtggaaaggaagagggcatgaagattgatttgattgacggaaagggaagaggggtaatcgccactaagcagttttctagaggtgactttgtcgtggaataccatggagatttgattgagattacagacgctaaaaaacgggaagcactgtatgctcaggacccatccaccggctgttatatgtactatttccagtatttgagtaagacctactgtgtggacgccacgagggaaacaaataggctcgggcggctcataaatcactccaaatgcggcaactgccagaccaagctccatgacattgatggtgtgccccaccttattctcattgcttcccgcgatatagcagcaggagaggaactcctgtacgattacggagacagatccaaagcttccatcgaggcccacccatggctgaaacattaa

SEQ ID NO: 521 - DNA, 2838 bp, synthetic construct
  source 1..2838: mol_type = other DNA
atgtctggccccgtgactgtgctgaccagacaaacaacagcagctgaactcgattctcacacgccagctctggagcagcaaaccaccagcagtgagaagactcccactaagaggaccgccgctagtgtgctgaataactttatcgagtccccgagcaaattgctggatacaccaattaagaatctgcttgacaccccagtgaagacccaatatgattttccctcatgcaggtgtgtggagcagatcattgagaaggatgaaggcccattctacacacatttgggcgccggcccaaacgtagcagctattagagaaattatggaggagcgcttcggacagaaggggaaggcgattcggattgaacgggtgatctacaccggcaaagaaggaaagtccagtcagggatgtccgatcgcaaagtgggtggtcagacgcagctcaagcgaagagaaactgctttgtctggtgcgggaacgggcaggacatacttgtgaagccgccgttatcgtgatattgatcttggtgtgggagggaatccctctgagccttgccgacaagttgtactctgaacttacagagacgcttcggaagtatggtactctgaccaacaggcgctgcgcacttaacgaagaaaggacctgtgcttgccagggactggatccagaaacatgtggcgcatccttttccttcggatgctcctggtcaatgtactataacggctgcaaatttgcccgctcaaagatccctcggaagttcaagctcctcggcgacgatcctaaggaggaggaaaagctcgaatctcacctccagaacctgagtacccttatggctcccacctataaaaagctggccccagatgcctataataatcagattgagtatgagcaccgggcccccgagtgtcggcttggactgaaggagggcaggcctttcagtggggtcaccgcttgcctggatttctgtgcccacgctcacagggacctgcacaacatgcagaacggctctaccttggtctgtactttgactagggaggataacagggagtttggtggaaagccagaggacgagcagttgcacgtcctgccactgtataaagtcagcgatgtcgatgagttcggatccgtggaagctcaggaggagaagaagcgatccggcgccatacaggtcctgtctagcttcaggcgcaaagtacggatgttggccgaacctgtgaaaacctgtagacagagaaaactggaggctaaaaaagccgccgctgaaaagctgtcctcactcgaaaactcctccaataagaatgagaaggagaagagcgcaccctcccggaccaagcagacagagaacgcctctcaggcaaaacagctcgctgaactgctgaggctttcagggcccgtgatgcaacagagccagcagccccagcctttgcagaaacagccgccccagccgcagcagcagcaacgcccccagcagcagcaaccacaccatccccaaacagagtcagtgaacagctacagtgccagcggcagcaccaatccttacatgaggcgcccaaaccctgtgtccccatacccaaactctagtcacacatccgacatctatgggtccaccagccctatgaatttttactctacaagctctcaggccgctggaagctacctgaatagcagcaaccccatgaacccttatcctggccttctgaaccagaacacacagtaccctagctaccagtgcaacggcaacctctctgtggataattgctccccctacctgggtagttacagtccacagtcccaaccgatggatctgtaccgctacccgagccaggatccactgagtaagctttccctgccgcctattcacactctttatcagccaaggtttggtaactctcagagttttacgagtaaatatctcggatacggcaaccagaacatgcagggagacgggtttagctcatgtacaattaggcctaacgtgcaccacgtcggcaaactgcctccttacccgacacatgaaatggacggccatttcatgggcgcaaccagtaggctgcccccaaacctcagtaatccaaacatggactacaagaacggagagcaccactcaccgagccacatcatccacaattatagtgccgcaccaggcatgtttaattccagcctgcatgccctccacttgcaaaacaaagaaaatgacatgctttctcataccgcaaacgggctcagcaagatgttgcccgcccttaatcatgataggaccgcctgcgtgcaggggggactgcataagctttcagatgcaaatggacaagaaaagcagcccctcgccttggtgcagggggtagctagtggtgccgaagataacgatgaagtgtggagcgacagcgagcaatcttttctggaccctgatattgggggggtggccgtggcccccacacatggtagcatcctgatcgagtgtgctaagcgcgaactgcacgccactacacctcttaagaatcctaaccgcaaccacccaacaagaatctccctggtcttttaccaacataaaagcatgaatgagcccaaacacggcctggccctttgggaggccaaaatggctgaaaaagcccgcgagaaggaggaggaatgcgaaaagtacggtccggattacgttccacagaagtctcatgggaaaaaagtgaagcgagagcctgctgaaccacatgagacttccgagccaacctatcttcggttcatcaaatctctggcagagcgcacaatgagcgtgaccaccgacagtacagtcaccaccagcccatatgcctttacccgcgttacggggccctacaaccgatatatttaa

SEQ ID NO: 522 - DNA, 1068 bp, synthetic construct
  source 1..1068: mol_type = other DNA
atgtcagtgaactacgctgcaggcctcagcccctatgcggacaaaggcaagtgtgggctgccagagatcttcgaccccccggaggaacttgagaggaaagtgtgggagctggctaggctggtgtggcaaagtagctccgtcgtctttcacactggtgctggcattagtacggctagcggcatccccgacttccgaggccctcacggcgtgtggactatggaagagcggggtctggcccccaaattcgataccacctttgaatctgcaagacccacacagacacatatggcactggtccagttggaacgcgttggtctgctgaggtttttggttagtcagaacgttgatgggctccatgtgaggtccggcttcccacgagacaagcttgctgagctccatggcaacatgttcgtcgaagaatgtgccaagtgtaagacacaatatgtacgcgacacagtggtcgggaccatggggcttaaagcaacaggcagactgtgtaccgtggctaaggcgaggggtcttagggcttgtcggggggagctgcgcgacaccatcctggactgggaagattccctgcctgatagggacctggctctggccgatgaggcatccaggaacgccgatctcagtatcacacttggaacaagtctgcagatccgaccttccggaaacctgcccttggctactaagcggcggggtggtcggctggtgattgtgaacctgcagcctactaaacacgaccgacacgcggatctccgaatccacggatatgttgatgaggtcatgacccggttgatgaaacacctgggtttggaaattccagcctgggatggtccaagggtactcgagcgggctctcccccctttgccgcggccccccacacctaagctggaaccaaaggaagagtccccaactcgcatcaatggaagcatacccgcaggacccaaacaggagccatgcgctcaacacaatgggtccgagccagctagccctaagagggagcgccctaccagccctgcgcctcatcggccccctaaaagggttaaggccaaggcggtgccctcctaa

SEQ ID NO: 523 - DNA, 2079 bp, synthetic construct
  source 1..2079: mol_type = other DNA
atgaagattttttgctctagggccaaccctaccacaggatccgtggagtggctcgaggaagacgaacactatgattaccaccaggagatcgctagaagctcctacgcagatatgctgcacgataaggataggaacgtcaaatattaccagggcattcgggccgccgtgtcccgcgttaaggatcgagggcagaaggcactggtcctggacatagggaccggaacaggcctgcttagtatgatggctgttaccgccggggccgacttctgttacgcaatcgaagttttcaaacctatggcagacgctgctgtaaaaattgtggagaagaatgggttcagcgataaaatcaaggtgatcaataagcacagcacagaggtgactgtcgggcctgagggtgacatgccctgccgggcaaacattctggtcaccgagttgtttgacacagagctgattggcgagggggcacttccctcatatgagcatgcccatagacaccttgtggaggaaaactgtgaggctgtcccccatagagcgacagtctatgctcagctggtcgaatcaggaaggatgtggtcttggaacaagctctttccgattcacgtgcagactagcctgggggaacaggtaatcgttcccccggtcgacgtggagtcatgcccaggagcaccatctgtctgcgatattcagctcaatcaggtttctcctgctgattttacggtactctccgacgtactccctatgttctcaatcgatttttccaagcaggtctctagttctgctgcttgccactccagaaggtttgagcccctgaccagtggcagagctcaggttgtactgagttggtgggacatcgagatggatcctgaagggaagattaagtgtacaatggctcctttctgggcacattctgatccagaagagatgcagtggcgggatcattggatgcaatgcgtttactttcttcctcaagaagagcctgtagttcagggaagcgccctttacctggtggcccaccacgacgactactgtgtgtggtactcactccagaggacatctccagaaaagaacgagagagtacggcagatgcgccctgtgtgcgactgccaagcccatctcttgtggaaccgaccccggttcggagagatcaatgatcaggaccgcaccgatcgctacgtgcaggcgctccggaccgtgctgaagccagattctgtgtgtctgtgcgtgagcgacggttctctcctgagcgtgctggcacatcacctgggggttgaacaagtttttacagttgagagctctgctgcatcccataaactgttgagaaaaatcttcaaagctaatcacttggaggacaagattaatataatagaaaaacggcctgagcttctcaccaatgaagatctgcagggcaggaaagtgtctctcctcctgggcgaaccatttttcacaacctctttgcttccttggcacaatttgtacttctggtacgtgcggaccgctgtcgatcagcaccttggaccaggtgccatggtgatgccccaggcggctagtcttcacgcagtggtcgttgagttccgagatctttggcggattagaagtccttgcggcgattgtgagggcttcgacgttcatataatggatgatatgattaaacgcgcactggatttccgggagtccagggaagctgagcctcatcctctgtgggaatatccgtgcaggtcacttagtgagccctggcagatcctcacctttgacttccagcagcccgttcccctgcagccactgtgtgcagagggaaccgtagaactgagaaggcccggacaatcacacgcagctgttctctggatggaataccacctcacgccagagtgcacactgtccacgggactgctggaacctgccgaccccgaggggggatgctgctggaatcctcactgtaagcaggcggtatattttttttccccagcccccgatccaagggcactcctggggggaccccggacagtgtcttatgctgtggagtttcaccccgacaccggggatataatcatggaattcaggcatgctgacactccagactaa

SEQ ID NO: 524 - DNA, 825 bp, synthetic construct
  source 1..825: mol_type = other DNA
tctagtagtatggcggatttccgcaaattctttgcgaaggccaagcacatcgtaattatcagcggtgccggagtcagcgccgaatccggagtgcccaccttcaggggcgccggtggatattggcgcaagtggcaggctcaggacttggcaacgcctctcgcgtttgcccacaacccatcacgcgtgtgggagttttaccactaccggagggaggtgatgggtagcaaggaaccaaatgccgggcaccgcgctatcgcggaatgtgagaccagactggggaagcagggcagacgggtggtggtgataacacagaacatagacgaattgcacaggaaggccgggaccaaaaacctcctcgagattcacggcagcctgtttaagacacggtgtaccagctgcggagttgtcgccgagaattataaatctcccatttgtccagctctttctggcaaaggcgcccccgaacctggcactcaagatgcctcaatccccgtagaaaagctccctagatgtgaagaggctggctgtggtggtctgctgaggccacatgttgtctggttcggagagaatctggaccccgcaatccttgaagaggtagacagagagctggcacattgcgatctctgtctcgtagtgggcacatcttccgtcgtttacccggcagcaatgttcgccccacaggttgccgctagaggcgtgcccgttgccgagtttaacactgagacaactccagcgaccaataggtttcgcttccattttcagggcccctgcggaaccacactgccagaagccctggcctgccatgagaacgagacagtatcctaa

SEQ ID NO: 525 - DNA, 2007 bp, synthetic construct
  source 1..2007: mol_type = other DNA
atggctgccaatatgtaccgggtgggcgattacgtttattttgagaattccagttctaacccatatttggtacgccgaattgaggaattgaacaaaaccgccaatggaaatgtagaggccaaggtcgtttgcctctttcgacgcagggacatttcaagttctctgaactccctggccgattcaaatgcacgggagtttgaagaggagtccaaacagcctggagtatccgagcagcagagacaccagttgaaacatcgggagctttttctcagccgacagttcgagtccctgcctgcgacacatattcggggtaagtgttccgtgacactcctgaatgaaacagacatcctcagccaatatctcgaaaaggaagactgcttcttttacagtctggtctttgacccagtacagaaaaccttgctcgctgaccagggcgagattcgcgtcgggtgcaagtatcaggccgaaatcccagataggctggtggagggcgaatcagacaacaggaaccaacagaagatggaaatgaaggtgtgggatccagataaccccctcaccgatcgccaaatcgaccagtttttggtcgtcgcacgcgccgtaggcacattcgctcgggctctggattgcagttcatctattcgccagccttctctgcacatgagcgctgccgccgcatcaagggatattactttgttccacgctatggataccttgcagagaaatggttatgatctggccaaggcaatgagtacactggtgcctcaaggcggccccgtcttgtgccgcgatgaaatggaagaatggtcagcatccgaggccatgctgtttgaagaagctctggagaagtacggtaaggacttcaatgatattagacaggacttcttgccttggaagtctctggcttccatcgtgcaattctactatatgtggaagaccaccgatcgctacatacagcagaaaaggcttaaggccgccgaagcagacagcaaactcaagcaggtgtacattccaacatataccaaacctaatccaaaccagattatctccgtcggatcaaagcccgggatgaatggagcaggattccaaaagggacttacatgtgagtcttgtcatactactcagtccgctcaatggtacgcatggggaccccccaacatgcagtgccgcctgtgcgcatcatgttggatctattggaaaaagtacggtgggcttaagacccccacacagctcgagggagccacacgcgggacgaccgaaccacattctcgaggtcaccttagccggccagaggcccagtccttgtctccttacacaacttctgccaaccgagctaaactgttggcgaagaatcggcagactttcctgcttcagaccaccaaactgacccggctcgccaggcggatgtgccgggatctcctgcagcccagacgcgctgccagacgcccttatgctccaattaacgctaatgcgatcaaagctgagtgtagcattagactgcccaaagcggccaagacccctctcaaaatccaccctctggtgagactgcctctggctaccatcgtgaaagatctcgtagcccaggctccgctgaaacccaaaacaccgcggggtacaaaaactcccatcaatagaaaccagctgagccaaaatcggggcctcggtggcatcatggtgaagagagcctacgagaccatggcgggggcaggtgtccctttttcagcaaatgggagacccctggcatcaggcatacgatccagcagccagccagccgccaagagacaaaagctgaaccctgccgacgcgcccaatcccgttgtgttcgtggccactaaggacactagggccctgaggaaagcgcttacacacctggaaatgcggagagcagcaaggaggcccaatctgcctcttaaggtcaagcccaccctgattgcagttcgccctccggtgccgctgccagcaccgagtcaccctgccagcacgaacgaacctattgtcctggaggactaa

SEQ ID NO: 526 - DNA, 1932 bp, synthetic construct
  source 1..1932: mol_type = other DNA
atggccgccgccgacgctgaagctgtacctgcacggggcgagcctcagcaggactgctgcgtgaaaactgaactgctcggagaggaaacccctatggctgctgatgagggtagcgcagagaagcaggccggagaggcccatatggccgccgacggtgaaactaacgggtcctgcgaaaacagtgacgcctcttctcacgctaatgcagccaagcatactcaggatagcgctagagtgaacccgcaggacggtacgaacacccttacacgcatcgctgagaacggggtgtccgaacgagatagtgaagcggccaagcagaatcacgtgaccgccgacgactttgtacagacgagtgttatcgggagtaatggttacatcctgaacaagccagccctccaagctcaacccctgaggactacatccactcttgcatccagccttcccggtcatgccgcgaagaccctgccgggcggcgccggaaagggacggaccccatccgcttttccccagacacccgccgcacctcccgccacactcggcgagggcagcgcggacaccgaggatagaaagttgccggcacctggtgctgatgttaaagtacaccgggcaagaaaaactatgcccaaaagtgtggtgggtttgcatgccgcatcaaaggatcccagagaagtccgggaagccagagaccataaggagccgaaggaggagattaataagaatatcagtgattttggtagacagcagctgctgccaccttttcctagcctgcatcagagtcttccacagaaccagtgctatatggcgaccactaagagccagactgcatgtctgcctttcgttctggccgcagcggtatcaagaaagaaaaaaagacgcatgggcacctatagtcttgtaccgaagaagaaaactaaagtgcttaagcagaggactgtcattgagatgttcaaatcaatcacccattccactgtcggctctaagggcgagaaggatctgggtgcgtccagcctccatgtgaacggggagtctctggaaatggacagcgacgaagacgattcagaggagctggaggaggacgacggacacggagccgagcaggcagccgccttccccaccgaagacagcaggacttccaaagagagcatgtccgaggccgaccgcgcgcagaagatggatggagaaagcgaggaagagcaggagtctgtggacacaggggaagaggaggaagggggcgatgaaagcgacctcagctccgaaagctccatcaagaaaaagttccttaaaaggaaagggaaaaccgattctccttggatcaaacctgcgcggaaaaggcgaagaagatccaggaaaaaacctagcggggccctgggctccgagagctataaaagttccgccggatcagccgagcaaacagcgccaggcgatagtaccggttatatggaggtaagccttgactcccttgaccttcgggtaaagggtattctgtccagccaggcggaaggactggcaaacggacccgatgttctggagactgacggcctgcaggaggtcccgctctgctcctgccgcatggagacccccaagagccgggaaatcacaaccttggcaaataaccagtgtatggcgacagagagcgtggaccatgagctcgggagatgcactaacagtgtcgtgaagtatgaacttatgcggccctcaaataaagcccccctgcttgtgctttgcgaggaccacagaggtagaatggtaaagcaccagtgctgtccaggctgtggatacttctgcacagctggcaattttatggaatgtcagcccgaatccagtattagccatcgctttcacaaagactgtgcttctcgggtgaataatgcctcctattgccctcactgcggcgaagaaagctctaaagcaaaagaggttactatcgcctaa

SEQ ID NO: 527 - DNA, 1968 bp, synthetic construct
  source 1..1968: mol_type = other DNA
aaagcggacaccacctcaacggtcacccccgtccctggacaagagaaaggatcagccttggaggggcgggcagatacaacaaccggatctgccgcaggccctccgctcagcgaggacgataagctgcaaggggccgcctcccacgtacctgagggatttgaccctactgggccggccggccttggccggccaacccccgggttgtcacaggggcctggtaaggaaaccctggagagtgcacttattgccctggatagcgaaaaacccaaaaagcttaggttccacccaaagcagctgtacttcagcgctagacagggggagctgcagaaggtcctgctgatgctggtggacggaatagaccctaacttcaagatggagcaccaaaacaaacggagtccgctgcacgccgcagccgaggcaggacacgtggatatctgccacatgctcgtgcaagccggggccaacatcgatacctgcagtgaggatcaaaggacacctctgatggaggccgcagagaacaatcatctcgaggccgtcaagtacttgattaaggccggcgctctggtagaccccaaggacgctgaaggcagcacatgccttcacctggcggcgaagaagggccattacgaggtagtgcagtatctcctttccaatggacagatggacgtgaattgccaggatgacggcggttggactccgatgatttgggccacggagtacaaacatgtagatctcgtgaaacttctcctctccaagggatccgatatcaatatccgcgataacgaggaaaacatttgtctccattgggccgcatttagtggctgtgtggatatagccgagatccttctggccgccaagtgcgatttgcacgctgtcaacatccatggggacagccctctgcatattgccgcaagagaaaacaggtatgactgcgttgtactgttcctgagtagggacagcgacgtgacccttaagaataaagagggagagaccccattgcaatgcgcctctctcaactcacaggtgtggtccgctctgcagatgtcaaaagcactgcaagactctgctcctgaccggccttctccggtggagaggatagtttccagggacatcgctcgggggtacgaacgaattccaattccctgtgtgaatgccgtggactcagagccttgtccaagtaattataaatatgtgtctcagaattgcgtaacgagcccaatgaatatcgaccgcaatataacccatctgcagtactgcgtgtgcatagatgactgctcctcatcaaactgtatgtgtggtcagctgtctatgcgctgctggtacgataaagatggaagactgctgccggagttcaacatggccgagcctccactgatctttgagtgcaaccacgcttgcagttgttggcgaaactgccgcaaccgggttgtgcagaacggactccgcgcaaggctccagctgtaccgcactcgggacatgggttggggcgtgcgcagtttgcaggatatcccccccgggacctttgtctgcgaatatgtcggggagctgatctccgactccgaggcagacgtgcgagaagaggactcttacttgttcgatctggacaacaaggacggtgaggtttactgcatagacgccagattttatggtaatgtgtcccggtttatcaaccatcactgcgagcctaatcttgtgcccgtaagagtgtttatggcgcatcaggacctgcggttccccagaatcgcgttcttttctactaggctcattgaggccggtgaacagctcggattcgattatggagaacggttctgggacattaaaggcaagctgttttcatgcagatgtggctcccctaagtgtagacactcatccgccgctctggcccagagacaggcctccgccgcccaagaagcccaagaagatggtctgcccgataccagcagcgccgcagctgccgacccactgtaa

SEQ ID NO: 528 - DNA, 3159 bp, synthetic construct
  source 1..3159: mol_type = other DNA
atggcacacaatgctggcgccgcagcagcggccggcactcactctgccaaatctggtggctccgaagccgctctgaaggaaggtggctccgcggccgctctgagcagcagcagtagctcttcagccgctgcagcggccgcgtcatcatcttcctctagcggtcccggttcagctatggaaacgggcctgctgccgaatcataagctgaaaacggtgggcgaggcacctgccgctcctcctcaccaacagcaccatcaccatcatcacgcccatcaccatcaccaccatgctcatcatctgcatcatcaccatgctctccagcaacagctgaaccagttccagcaacagcagcagcagcagcagcaacaacagcagcagcaacagcagcagcaacacccgatcagcaataataactccttgggaggagcggggggaggtgccccacagccaggccctgatatggagcaaccacaacacgggggggcaaaggattcagccgccggcggacaggccgaccctccagggcctcctctgctgagcaaacctggtgatgaggacgacgcacctccaaaaatgggcgaacccgcagggggcaggtatgagcacccaggtctgggtgccctcggcacccagcagcccccggtcgccgttccaggaggcgggggaggaccagctgcagtccccgagttcaataactactacgggtccgccgccccagcctctggggggcctggagggagggctggcccgtgctttgatcagcacggcgggcagcagtctcccgggatggggatgatgcactctgcttcagcagcggccgctggtgcaccagggagcatggatcccctccagaattcccacgagggctaccccaatagccagtgcaaccattacccgggctatagcagacccggcgcaggaggcggtggagggggcggaggggggggtggtggaggctccggcggaggcggcggtgggggaggagctggagcaggaggcgctggtgcaggggctgttgccgctgccgcggcagcagcagcagccgccgcaggaggtggcgggggcggcggctacgggggttcctccgccggatatggcgtgctgagctcccctagacagcagggaggtggcatgatgatgggccccggagggggtggagctgccagcctgagcaaggccgctgctggatcagcagctggcggatttcaacgctttgcaggccaaaatcagcaccccagtggagccaccccgactctgaaccagctcttgacgtccccgtcccccatgatgaggtcctacggcggcagctaccccgaatatagctcaccttccgctccacccccacccccaagccaaccccaatcacaggcggcagcggccggtgcagctgcaggaggacagcaggctgctgcaggaatggggcttggtaaggacatgggagcccaatacgccgccgcttcacccgcatgggcagccgcccaacagcggagccaccctgccatgtcccccggcacaccgggaccaactatggggagatcacaggggtcacccatggaccccatggttatgaagcgaccacagctgtacggaatgggctctaaccctcactcccagccccaacagtcctccccctacccaggagggagctatgggccccccggcccacaacgctacccaatcggcattcagggcaggacacctggcgcaatggccggcatgcagtacccgcaacaacagatgcccccacagtacggtcaacagggtgtcagcggctactgccagcaagggcagcagccttactattcccagcagcctcagcccccccacttgcctcctcaggcccaatacctgccctctcaatcccagcagcggtatcagccccagcaggacatgtctcaagagggctacggtactcggtcacagcctcccctggcgcctggcaaaccaaatcacgaggatctgaacttgattcagcaggaacgcccatctagtctgcccgatctcagcggttctattgacgaccttcccactgggacagaggcgaccctgagctcagcagtaagcgccagtgggtccacgagcagccagggtgaccagtccaacccagcacagtcccccttttctcctcatgccagccctcacttgtctagcatccccggtggtccttcacccagtcccgtaggatcacccgtgggcagcaaccagtccagatctggacctatctccccggcatcaatacccggaagtcagatgccacctcagccccctggctcccagagtgagagcagcagccaccctgccctctcacagagcccgatgccccaggaaagggggtttatggcagggactcagagaaatcctcagatggcccaatatgggccccagcagaccgggccatcaatgagtccacacccctccccaggcggtcagatgcacgccggcatttcttcctttcagcagagtaactcctccggaacttatggaccacaaatgagccagtatggccctcaaggcaattattcaaggccccccgcttactctggagtaccgtcagctagctactcagggcccgggcccggcatgggcataagcgccaacaaccagatgcatggtcaggggccctcccagccctgcggcgctgtgcctctggggaggatgcctagcgctggcatgcagaatagaccctttccaggaaacatgtcaagtatgaccccctcaagtccgggaatgtctcagcagggtggaccgggcatgggccccccaatgccaacagtcaatcggaaggcccaggaggcggccgcagctgtcatgcaggccgccgctaattccgcccaaagcagacagggaagttttcccggcatgaaccagtccggcctgatggcttcctctagcccctacagccagcccatgaataacagcagctccctcatgaacacccaggcacccccttattcaatggctcccgccatggtgaattcctcagcagcatctgtgggccttgcagatatgatgagccctggggaatctaagcttccgcttcccctcaaagctgacggtaaagaagaaggaacccctcagcctgagagtaagtcaaaaaaatctagcagcagcaccactacaggggagaagatcacaaaggtgtacgagctgggtaattaa

SEQ ID NO: 529 - DNA, 3279 bp, synthetic construct
  source 1..3279: mol_type = other DNA
aggggagaagagccgccccccgaagtcttttcaacgggcgataccaagaagcaacctaagctccaaccaccctcacccgccaacagcggcagcctgcagggacctcaaactccgcagagcactggctccaattccatggcagaggtgccaggtgatctcaagccccctactcctgcttctacaccgcacggacagatgacccctatgcagggtggccgctctagtacaattagcgttcacgaccctttttctgatgtgagcgactctagtttcccaaagcggaatagcatgacacctaatgccccttaccaacagggcatgagtatgcctgacgtgatgggacggatgccttatgaaccaaacaaggacccattcggaggtatgagaaaggtaccagggtccagcgaacctttcatgacacaaggacagatgccaaacagctcaatgcaggatatgtataatcagagcccttctggagccatgagcaacttgggaatgggccagagacagcagtttccatacggagcctcctacgaccggagacatgagccctatggacagcaataccccggccaaggccctccaagcggtcagccaccatacggcggccaccaaccaggcctgtacccccaacagcctaattataagcggcatatggatgggatgtacggaccacctgctaagcggcacgaaggagatatgtacaacatgcagtattctagtcagcaacaagaaatgtataatcaatacggtgggagctatagtggccccgaccggcggcctatccaggggcagtacccctatccctattctagagaaagaatgcagggaccagggcagattcagacccacggcattccccctcaaatgatgggggggccactgcagtcttcttcatccgagggtcctcagcagaatatgtgggccgcaaggaatgacatgccatatccctatcagaatcgacagggccccggtggtcccacccaagctccaccttaccctggcatgaacagaaccgacgacatgatggtgccggatcagcgaattaatcacgagtcacaatggccctcccacgtctcacagaggcagccatatatgtcctccagcgcgtcaatgcaacccatcacccgacctccccaaccatcttatcagacacccccctccctccctaaccacattagtagagccccttctcccgcttccttccagcggagcctcgagaacagaatgagtccctctaaaagtccatttctgccgtccatgaagatgcaaaaggtcatgcctacagtgcctacatctcaggttacagggcctccaccccaacctcctcccatcaggcgagaaatcacatttccccctggttccgtggaggcgagtcaacctgtgctgaagcaaagacggaagattacgagcaaggacatcgtgacacccgaggcttggcgcgtcatgatgtcattgaaatctggtctcctggccgaatctacttgggcccttgacacgattaacattctcttgtacgacgactcaaccgtcgccactttcaacctcagccagctcagcgggtttctcgagttgctcgtggaatacttccggaaatgtctgatcgatatttttggaatcctcatggaatatgaagtgggggacccaagccagaaggcacttgaccacaatgctgcccggaaggatgacagccagtccttggcagatgactctgggaaagaagaggaggacgccgagtgcattgatgacgatgaagaggatgaagaggacgaggaagaagacagcgaaaagactgaatcagacgagaagtccagcattgccctgaccgccccagacgccgctgccgaccctaaggaaaaaccaaaacaagcgtcaaaatttgataaattgccaatcaagatcgttaaaaagaataacctttttgtggtagatcggagtgacaagctgggacgggtacaggagttcaacagcgggctcctgcactggcagctgggtggaggagacactactgaacatatccaaacacatttcgagagcaaaatggagataccgccacgcagaagaccaccaccacccctctctagcgctggcagaaaaaaagaacaagaagggaagggagattctgaagaacaacaggagaagtcaatcatcgcaaccattgatgatgtgctcagtgctaggcccggggcactgccagaggatgcgaatcctggcccccagacggaatcatcaaaattccccttcgggatccaacaggctaagagccatcgaaatattaaactccttgaagacgagcctagatccagggacgaaacccctctgtgcacaatcgctcactggcaagactccctggctaagcggtgcatttgcgttagcaacatcgtacgatctttgtccttcgtgcccggcaatgatgcagagatgtccaagcacccaggactggttctgatcctcggaaaactcatcctgcttcaccacgagcatcccgagagaaagagagctcctcaaacctatgagaaagaggaagatgaagataagggtgtggcctgctccaaggacgaatggtggtgggattgcttggaggttctgcgggacaatactctcgttactctggctaatataagcgggcagctggatctgtccgcctacaccgaatccatatgtctccccatactggatggattgctgcactggatggtatgcccctcagcggaggctcaggaccccttcccaacggtgggccctaattccgtcctctctccgcaaagactggtgctcgagaccttgtgtaagttgtcaattcaggacaacaatgtggatctgattctcgcaactccgcctttcagtagacaagaaaaattttatgccaccctggtgcgctacgtgggggatcgcaagaaccccgtttgtcgcgaaatgagtatggcactcctgtctaatctcgcccagggtgatgccctggccgcccgagcaatcgctgttcagaagggctccatcggtaatctgattagctttctggaagatggtgtcaccatggcccagtatcagcagagtcagcataatctgatgcacatgcagcccccacccctggaacctccttctgtggacatgatgtgccgcgccgcgaaggcccttctggcaatggccagggtcgacgaaaaccgcagtgagtttctgctccacgagggccgactcctggatatctcaatatccgctgtgttgaatagcctggtggcaagtgtcatttgcgacgtactctttcaaatcggtcagctgtaa

SEQ ID NO: 530 - DNA, 2838 bp, synthetic construct
  source 1..2838: mol_type = other DNA
aagaagccccattaccgagaaatagtgtgggtgaaggtgggtcggtatcgatggtggcccgcagagatttgccacccccgcgcagtgccctccaatattgataagatgcggcatgatgtgggcgagtttcctgttctcttttttggctctaatgactacctgtggacacatcaggcccgcgttttcccttatatggaaggagacgtgtcctccaaggacaagatggggaaaggggtcgacggcacatataaaaaagccctccaggaagctgcggctcggtttgaggaactgaaggctcaaaaggagcttagacagctccaggaggacaggaaaaacgacaaaaagcctcctccgtacaagcatatcaaggttaaccggcccatcgggcgagtgcagatttttaccgccgacctctcagagatcccccgatgcaactgtaaggccaccgacgagaacccctgcggcatcgattccgaatgtattaaccgcatgctgctctacgaatgtcatcccactgtctgtccagctggagggcgctgtcagaatcagtgcttctctaaaaggcagtaccctgaggtcgagattttcaggaccctgcaaagaggatggggtctccggactaagactgatataaaaaaaggagagtttgtgaacgagtacgtgggagagctgattgacgaagaggagtgccgggctcgaatccgatatgcgcaagagcacgacatcacaaacttttacatgttgaccctggacaaggaccgaattatcgacgctggacctaaggggaactatgctcggttcatgaaccactgctgtcagcctaactgtgagacccagaagtggtccgtgaacggcgataccagagtgggcctctttgctttgagcgatatcaaagcggggactgagctgacctttaattataatcttgagtgtctggggaatggtaagacagtctgtaagtgcggcgctccaaactgttctgggtttctgggggtacggcctaaaaaccagcctatagcgacggaggaaaaaagcaagaagtttaaaaaaaaacagcagggaaagaggaggacccaaggggaaatcactaaggagcgggaggatgaatgtttcagctgtggcgatgccggacagctggtgtcttgcaaaaagcctggctgccccaaggtgtatcacgctgattgtctgaatctgactaagagaccagcgggaaaatgggaatgtccatggcaccagtgtgatatttgtggtaaagaggcggcatctttctgcgaaatgtgtccctccagtttctgcaagcagcacagagaaggcatgctgttcatcagtaaacttgacggaaggctctcctgcaccgagcatgatccctgtggacccaacccccttgagccaggcgagattcgcgaatatgttccaccgcccgtgccactgccccccgggccaagtacccatctggctgagcagagcacaggcatggccgcccaagcgcctaagatgtccgacaaaccccccgctgacacaaaccagatgctgagccttagcaaaaaagccctggctggcacatgtcagcgacctctgctgccggagcggcctctggagcgaaccgatagccgcccacagccgctcgataaagtgcgcgatctggccggcagtgggacaaagtcacagagcctggtcagtagccagcgacctctggatagacccccagctgtcgccggcccaaggccccagctgagcgacaaaccgagccccgtcacttcaccttctagtagcccatccgtccgctctcagcctctcgagagacctctgggcactgccgatccaaggctcgataaatcaatcggggctgcaagtccccggccacagtctcttgagaaaacaagtgttccgacaggcctccgactgccaccaccagacagattgctgataacttcctccccgaaaccacagacatctgatcgccctactgacaagcctcacgcctctctttctcagcgacttcccccacccgagaaggtattgagcgcagtggtccaaacattggtggccaaggagaaagcactgcggcctgtagaccagaacacacagtccaagaatagagcagctctggtgatggacttgatcgatctgaccccaagacagaaggaacgggccgctagcccccaccaagttacaccgcaggccgatgagaaaatgcctgttttggaatcaagcagttggcctgccagcaaaggcctgggccacatgcctcgggctgtcgaaaaagggtgcgtgtcagatcccctgcaaacttccggcaaagctgcagcaccatctgaagatccttggcaggccgtcaagagtttgacacaggccaggttgttgtcacaaccgccagctaaggccttcctttacgaaccaactactcaggctagtggaagggctagtgccggtgctgaacagaccccaggacccctcagccagtctccagggctggtgaaacaggcaaaacagatggtgggtggacagcaattgcctgcgctggccgctaagtctgggcagtcctttcgcagccttggaaaggctccagccagcctgccaacagaagaaaaaaagctcgttaccaccgaacagagcccctgggccctggggaaagctagctcaagagccggtctgtggcccatcgtggctggtcagactcttgcacagtcatgctggagtgcagggagcacgcaaacattggctcagacctgctggagtcttggacgcggccaggaccccaaacctgagcagaataccctccccgccctgaaccaagccccatcatcccacaaatgcgcagagagcgaacagaaataa

SEQ ID NO: 531 - DNA, 1812 bp, synthetic construct
  source 1..1812: mol_type = other DNA
gctgtggtctctatgcaggctttccaggcagcacagtttgtgaacccagaactcaatcgggacgaggagggggcggctctgcacctgtccccagacactgtcacagacgtcattgaagccgtggtccagtccgtgaacttgaaccctgagcataagaagggattgaagcggaaaggctggctgctggaggagcagacacggaaaaagcagaaacctctgccagaagaggaagagcaggagaacaataaatccttcaacgaagctcccgtggaaatcccaagtcctagcgaaacccctgctaaaccatctgagccagagtctactctgcagcctgtccttagtctgattccacgcgaaaagaagccgccccggccaccaaagaagaaatatcagaaagccggcctctatagtgacgtgtacaaaacgacagaccccaagtcccgcttgatccaattgaaaaaagaaaagcttgaatacactcctggagaacatgagtatggacttttccccgcacctatccacgtggtgttcttcgtgtccggcaaatacctgcgccagaagcggattgactttcagctgccctatgatattctctggcagtggaagcacaaccagctgtacaagaagccagatgtaccactgtacaaaaaaattcgaagcaatgtttacgttgacgttaagccactttctggttacgaagccacgacatgcaattgtaaaaagcctgacgatgacaccaggaagggttgcgtggatgactgccttaatcggatgatttttgcggagtgctctccgaacacttgcccttgcggcgagcagtgttgcaaccaacggattcagcggcacgagtgggttcagtgcctggaacgattccgagccgaggaaaagggatggggcatcagaaccaaagagccactgaaagctggccaattcatcattgagtacttgggagaggtggtgtccgagcaggaatttcggaaccgaatgatcgaacagtaccacaatcattccgaccattattgtctcaacctcgactccgggatggttatcgactcatacaggatggggaatgaagctagattcatcaatcattcatgtgaccccaactgtgagatgcaaaagtggtccgtgaatggcgtataccggataggtctttatgccctgaaggacatgccagcaggaactgaactcacctatgattataactttcacagctttaatgtggagaaacagcagctgtgcaaatgtgggttcgaaaaatgtagaggcataatcggagggaagtctcaaagggtgaacggacttacaagtagtaaaaattcccagcccatggccacacataagaagtccggtcgctcaaaagagaagaggaaatccaagcacaagctgaagaaaagaaggggacacctcagcgaggaaccttccgagaatataaacacacccaccagacttactccccagctgcagatgaaacctatgagcaatagggagcgcaactttgtcttgaaacatcacgtctttttggtgagaaactgggagaagattagacagaaacaggaggaagttaaacatacaagcgacaacattcactccgcctccctgtacacacgatggaacggcatatgccgcgacgatggtaatatcaaaagcgatgtatttatgacccagttcagtgcacttcagaccgcccgatcagtccgaacccggagactcgccgctgcggaggagaacatcgaggtggcaagagctgccagactggcccagatctttaaggagatatgcgacggaattatctcctataaagattcttaa

SEQ ID NO: 532 - DNA, 1017 bp, synthetic construct
  source 1..1017: mol_type = other DNA
ccggtggatagggaagtgcctatgatcccgagaccccattatgctcagcccggttgtgtctacttcatctgcttgctgagggacgacctgctgctgcggcagggggactgtgtttatctgatgagggattcacgccggacgcctgacggtcatcccgtgcgacagtcatataggctgctgagccatatcaacagggacaaattggacattttcaggattgaaaaactgtggaagaatgaaaaggaggaaagatttgcttttggtcatcattactttagacctcacgagacccatcattccccatcacggagattctatcacaacgaactgtttcgggtgcctttgtacgaaattattccacttgaagcagttgtcggcacatgctgcgttctggatctgtacacatattgcaagggtagaccaaaaggcgtgaaagaacaggatgtgtatatttgcgactacaggctggacaagtccgcgcacctgttttacaaaatacataggaaccggtaccctgtctgcaccaagccatacgctttcgaccattttccgaagaagcttacacctaagaaagacttttctccccattacgttccggataactataaaaggaatggtggacggagctcctggaagagtgaaagatctaaacccccactcaaggacttgggtcaggaggatgacgccctgcccctgattgaagaggtcctggcgtctcaggaacaagctgctaacgagatccccagcctggaggagccggagcgggagggggcaaccgcgaatgtgtccgaaggtgagaagaaaaccgaggagagcagccaggagccacaatcaacctgtacccccgaggagcgaaggcataatcagagggagcgcctcaaccaaatcctgctgaatctcctggagaaaatccctggcaagaatgctattgacgtgacatacctgctggaggaagggtccggcagaaaactgcggagacggacattgttcatcccggaaaacagctttcggaagtaa

SEQ ID NO: 533 - DNA, 861 bp, synthetic construct
  source 1..861: mol_type = other DNA
atcggtctgtttgtaccagcaagcccacccctcgatcccgaaaaggtgaaggaactccagcgatttataacattgagcaagcgcctcctcgtaatgaccggggcgggaattagtaccgagtccgggattccagactacaggtctgagaaggtgggtctctacgctagaactgaccggagacccattcagcacggagatttcgtgcggtccgctcctattcgacagaggtattgggccaggaacttcgtcggatggccacagttcagtagccatcaacccaatcccgcgcactgggcactgagtacgtgggaaaagctcggaaagctttattggttggtgacccagaatgtagacgctctgcacacaaaagcaggttctagacgcctcacggaactgcatggatgtatggaccgggtgctgtgcctggactgcggagagcagacccctagaggggtactgcaggaaagatttcaggtcctcaatccaacttggtcagcggaagcccacgggctcgctcccgacggtgacgtctttctgtctgaggagcaggtgcggtcctttcaggtgcccacatgcgtccagtgtggcggccacctgaagcccgacgtggtgttctttggagataccgtgaatcctgataaggtggacttcgtacacaagcgcgtcaaggaagctgattcactgttggtggtgggttcctccctccaagtgtatagtggataccggtttatcctgaccgcttgggaaaagaaactgcctatcgcgatcctgaacatcggacccactcgctctgacgacctggcctgtctcaaacttaattcaagatgtggtgaactgctgccgctgatcgacccatgctaa

SEQ ID NO: 534 - DNA, 1449 bp, synthetic construct
  source 1..1449: mol_type = other DNA
atggcccagactcagggcacaagacggaaggtgtgctattattatgatggcgacgttggcaattactactacgggcagggccatccgatgaaaccccacagaatcaggatgacccacaatttgctgctgaactacggcctctaccgcaaaatggaaatctatagacctcacaaggctaacgcagaggagatgactaaataccatagtgacgactatatcaagtttcttcgcagtatccggcctgataatatgtccgaatatagtaaacagatgcagaggtttaatgtgggcgaagactgtccagtgttcgatggactgtttgagttctgccagcttagcactggggggtcagttgccagcgctgtaaagttgaacaagcagcagactgatatcgctgtcaattgggcagggggcctgcaccacgctaaaaaaagtgaggcttccgggttttgttacgtgaatgatatcgttctggccatcctcgaactgcttaagtatcaccagcgcgtgctgtatattgacatagacatccaccacggcgatggtgttgaggaagccttctacaccacagacagagtgatgaccgtgtcatttcataagtacggcgagtatttccctggcaccggtgacttgcgagatataggagctggcaaaggcaagtattacgccgtcaattatccactgcgcgacggcatcgatgatgaatcctacgaggccatctttaaaccagtcatgagtaaggtcatggagatgtttcagccgtcagctgtagtcctgcaatgtgggtcagacagcctgtcaggggataggctgggctgtttcaacctgacaatcaagggacatgcaaagtgtgtggagttcgtcaagagtttcaacttgcctatgttgatgttgggcggcggggggtacactattcgcaatgtggcccggtgctggacttacgagacagcggttgccctggacactgaaataccgaatgagctgccttataacgattacttcgagtatttcggacccgattttaaactccacattagcccatcaaatatgacgaatcagaatacaaatgaatatctggaaaagataaagcagcggctttttgaaaacctgagaatgcttccccacgcacctggcgtccagatgcaggccatccccgaagatgccataccagaggaatccggcgacgaggacgaagacgaccccgacaagaggatatctatctgtagctccgataaaaggattgcatgcgaggaggaattttccgatagtgaggaagaaggtgaaggcggccggaaaaacagtagcaacttcaaaaaggctaagagagtcaagactgaggacgagaaagagaaggaccccgaggaaaaaaaggaggtaactgaggaagagaaaactaaggaggagaagcccgaggccaagggggtcaaggaggaggtcaagctggcataa

SEQ ID NO: 535 - DNA, 1392 bp, synthetic construct
  source 1..1392: mol_type = other DNA
atggctacggtcactgctactacaaaggtgcccgaaatccgcgacgtcactcgcatagagcggattggcgcccatagccatatcaggggcctcggtctggacgacgccctggagccccgccaggcgagccagggcatggtagggcagcttgctgcaagaagagcagccggcgtggtcctggagatgattagggaaggtaagattgctggccgggccgtgcttattgcaggacagcctggcacgggcaaaactgccattgccatggggatggcccaggccttggggccagacaccccttttactgcgatagccggcagcgaaatatttagcctcgagatgagcaagactgaagcgctgactcaggcctttcggcggtccatcggggtgcgcatcaaggaggaaaccgaaataattgaaggcgaagtggtggagattcagattgacagacctgccaccggcacaggatccaaggtcggtaagctgactttgaagactacagaaatggaaactatctatgatcttgggacaaagatgatcgagtctttgactaaggacaaggtgcaggctggggacgttataactatagacaaggcgaccggaaagatctctaaactcggacgatccttcacccgggcgagggactacgatgcaatggggtctcagactaagttcgtacagtgcccagatggagaacttcaaaaacgaaaagaagtggtgcacaccgtaagccttcatgagatcgacgttattaacagccgcacccagggttttctggccctcttctccggtgacacgggagaaattaaatccgaagtgcgagagcagatcaacgccaaggtggcggaatggagggaagaaggcaaagccgagatcattcccggagtgctgttcatagacgaagtccacatgctggacatcgagagcttctccttcctgaaccgggctctggaatcagacatggcgcctgtcctgatcatggccacaaatcgagggattactagaattcgggggacttcctatcagagccctcacgggattccaatcgacctcctggataggttgctcatcgtgagtaccaccccctactctgaaaaggacaccaaacagatcctccggatccgatgtgaggaggaagacgtggaaatgagtgaggacgcatacacagtgctcaccagaatcggacttgagaccagcctcagatatgccatccagttgatcaccgcagccagtttggtgtgccgcaagcgaaagggcactgaggttcaggtcgatgacataaaacgcgtgtactctctgtttctggatgagtctagatccacacagtacatgaaagaatatcaggatgccttcctgttcaatgagctcaaaggggagactatggacacctcctaa

SEQ ID NO: 536 - DNA, 1875 bp, synthetic construct
  source 1..1875: mol_type = other DNA
atgacacaggctgagaagggagatactgagaacggcaaggagaagggaggggagaaggagaaggagcagcgcggtgtgaaaagaccaattgtgcctgccttggtgcctgagagtctgcaggaacaaatccaatccaattttattattgtgattcatcccggctctactaccctgcgaatagggcgggccactgatacactgcccgcctctatacctcacgtcattgctaggagacataagcagcagggccagcccctttacaaggattcctggctgctgcgcgaagggttgaacaaaccggagtcaaacgaacaacgacaaaatggactcaagatggtggaccaggccatctggagtaaaaaaatgagcaacggtactaggaggatacccgtcagcccagagcaggctaggagttacaataaacaaatgcggcctgcgattctcgatcactgtagtggcaacaaatggaccaatacctcacaccaccccgagtacctcgttggcgaggaggccctgtatgtgaacccactcgactgctacaatattcactggcccataaggagaggacagctcaacatccaccccggtcccggcggaagtctcacggctgttctcgctgacatcgaggtcatctggtcccatgctattcaaaagtacctggaaatcccactgaaggacctcaaatattaccgatgcatccttctcattccagacatatacaataagcagcatgttaaagagctggtaaatatgatactgatgaaaatgggattttccggcatcgtcgtgcatcaggagagcgtttgtgccacttatgggtccggattgagttctacatgtattgttgatgtgggtgaccagaagacgtccgtttgctgcgtggaggacggggtaagccacaggaataccagactttgtttggcttacggggggtccgacgtgtccaggtgcttctattggctgatgcagcgggccggcttcccttaccgcgagtgtcaattgacaaataaaatggattgtttgctgcttcaacacctcaaggagacattctgtcatttggaccaggacatctccggcctgcaggatcatgaattccagattagacatccggatagccctgctttgctgtatcagttcaggctgggggatgaaaagctgcaggcacctatggccctcttctatccagcaaccttcgggattgtaggacagaaaatgactactcttcaacatcgatcacagggcgatcccgaggacccccacgacgagcattacctgctcgctacacaaagcaagcaggaacagtccgccaaggctaccgcagataggaaatccgcctcaaaacccattggcttcgagggagacctgaggggccagagttctgatctccccgagagactgcattctcaagaggtggatcttggctccgctcagggcgatggcctcatggctggcaacgattctgaagaggcgctgaccgcactcatgagcaggaaaacggcaatatcccttttcgaggggaaggcattgggtctggacaaagctattctgcatagcattgactgttgcagcagtgatgacacgaagaaaaagatgtattcaagcattctcgtggttggcgggggactgatgtttcataaagctcaggaattcctccagcacagaatcctgaacaaaatgcctccctctttcaggcggataatcgagaatgtcgacgttatcactagacccaaagacatggaccccaggctgatcgcctggaaaggaggcgcagtgttggcttgtctggataccacccaagagctgtggatttaccagcgggagtggcaacggtttggcgtccgaatgcttcgggagagagccgcatttgtgtggtaa

SEQ ID NO: 537 - DNA, 1005 bp, synthetic construct
  source 1..1005: mol_type = other DNA
atggccgagtgcaagcgccctcccgaagccttcggctttgaacaagccactcgagagtacacactccagtccttcggtgaaatggcagattcttttaaagccgattatttcaacatgcctgttcatatggtgcccactgagctggtcgagaaagagttttggcggctggtgaattcaatcgaggaagatgtgaccgtggagtatggagccgatattcactccaaagaattcggctctggcttcccagtatccgacagcaaaagacatctgactcccgaagaggaggagtacgcaactagcggctggaatctcaatgtcatgcctgtcctggaacaatcagtcttgtgccacattaatgctgacatttccggcatgaaggtaccgtggctgtatgtgggcatggtgttctccgcattctgctggcacatcgaagatcactggagctattccatcaactacctgcactggggggagccgaaaacctggtacggtgtgccctctctggctgcagagcacctggaagaggtcatgaagaagcttacaccggagctgttcgattcacaacctgacctgctccaccagcttgtaactttgatgaatccaaatactctgatgagccacggcgtgcccgtggtaagaaccaaccaatgcgccggagagtttgtgataaccttccctcgggcgtaccactctggcttcaaccagggatacaattttgccgaagctgtgaacttctgcacggcggattggttgccagctggacgccaatgtattgaacactacagaagactgcgaagatattgtgtattctctcacgaggagctcatttgtaaaatggcggcgtgtcctgaaaaattggatctgaatctcgccgcggctgtgcacaaagagatgttcattatggttcaggaggaacgcaggctcaggaaggccctgcttgagaaaggaattaccgaggccgagagagaagcattcgaactgctgcccgacgacgaacgacagtaa

SEQ ID NO: 538 - DNA, 1389 bp, synthetic construct
  source 1..1389: mol_type = other DNA
atgggccctgaccgggtaactgccagggaactgtgtgaaaacgacgatcttgcgacttcactcgttctggatccctacctcggatttagaacccataaaatgaacgttagtcctgtgccacctctgcgacgacagcaacatctgagaagcgcactggagacatttctgcgccagcgcgacctcgaggctgcctaccgggccttgactctgggcggatggacagctcggtacttccagagtcggggtccgcgccaggaggccgccctcaagactcacgtctaccgctatttgcgcgccttcctgcctgagagtggtttcacaatcctcccttgcactcgatattccatggaaacaaacggcgccaaaatcgtctcaacacgggcttggaagaagaacgaaaaactggaactgttggtcgggtgcatcgccgaactgagggaggccgatgaggggttgctgcgcgcaggcgagaatgactttagtattatgtattctaccaggaaaagatcagctcagctgtggctcggtcccgccgcctttatcaatcacgactgtaagccgaattgcaaattcgtccccgccgacggaaacgccgcctgcgtcaaggttctgcgcgacatcgaaccgggtgatgaggtgacttgtttctatggcgaaggattctttggagaaaaaaacgaacattgcgaatgccatacctgcgagcgaaaaggggaaggggccttcaggactcgcccacgggaacccgctctccccccgaggcccttggataagtaccagttgagggagacaaagagaagacttcagcagggactcgatagcggctcaagacagggattgctcggtccgagggcatgcgtgcatccctcacccctgcgcagagatccattttgtgcggcatgccaacctcttagactgccagcctgtagtgctcggcccgacacctcccctctttggctccagtggctgcctcagccccaacccagggtgcgacctaggaagagaaggcgcccccgaccgcggcgcgcaccagtcctgagtacccaccacgccgcccgcgttagccttcatcgctggggaggctgcggaccacattgccgcctgagaggtgaggcccttgtggctctcggccagcctccacatgcccggtgggctccacagcaggattggcactgggcacgcaggtacgggctgccctatgttgtgcgagttgatctgcggcgactggctcccgccccaccggctactcctgccccggctggtacccccggacctatcctgatccccaagcaggccctggcgttcgcccctttctccccccctaagcggctcagactggtggtgtcccatgggtctatagaccttgacgttggcggagaagagctctaa

SEQ ID NO: 539 - DNA, 1596 bp, synthetic construct
  source 1..1596: mol_type = other DNA
atgagtgggaggggagccggaggattccctctgccacctctgtcacctggggggggagcagttgccgccgcactgggggccccgccaccaccagctggccctggtatgctccctgggcccgcgctgcgaggacccgggccggctggtggggtggggggccctggagccgctgcgttccgacctatgggtcccgcaggacctgctgcccagtaccagagaccaggcatgtctcccggcaatcggatgccgatggcgggtctccaagtcggaccaccagcaggctcccccttcggcgccgccgcccccctgaggccagggatgccacccaccatgatggacccgtttagaaaacgcttgctcgttccccaggcacagcccccaatgcccgcgcaacggcgcggtctgaagcgccggaagatggcggataaggtgctgccccagaggattagggagctcgttcccgaaagtcaggcctatatggaccttctggcttttgaacgcaaactcgaccagacaatagcacggaagaggatggagatccaagaggccatcaaaaaaccacttactcagaagaggaaactccggatctatatctccaataccttcagccctagtaaggcggaaggggactcagctggtacagctgggaccccaggggggacacccgctggagacaaggttgcatcttgggaactccgcgttgaaggcaagctgcttgacgatcccagtaagcagaaacggaaattttccagcttttttaagagtcttgtgattgagctggacaaagaactgtacgggccagacaaccacttggttgagtggcaccgcatgcctaccactcaggaaacggacggctttcaggtaaaacgacccggcgatcttaacgtcaagtgcacccttctcctcatgctggatcaccaaccccctcagtacaaacttgatccaagactggcgaggctgcttggggttcatacacaaacaagagcagcaatcatgcaggccctgtggctctacattaagcacaatcagctgcaggatgggcacgagcgggaatatatcaactgcaaccgctactttagacagatttttagctgtggacgcctccggttcagcgaaatccctatgaagctggcaggactgcttcagcaccctgacccgatcgtcatcaaccacgtgatcagcgttgatcccaacgaccagaagaaaacagcttgttatgatatcgatgtcgaggtggatgacccgctgaaagcacagatgtctaactttctggctagcactactaatcagcaggaaatagcttccctggacgtgaaaatacacgagacgatcgaaagtattaaccaactcaagacgcagcgggacttcatgctgagtttctctactgatcctcaggactttatccaggaatggctgcgctctcagaggcgagacctcaagatcataaccgatgtgattgggaaccctgaggaggaacgacgggcggccttttaccaccagccatgggctcaggaagccgtgggtcgacacatctttgccaaagtgcagcagagacgccaggagctcgagcaggtcctcggtattcgcctgacctaa

SEQ ID NO: 540 - DNA, 2697 bp, synthetic construct
  source 1..2697: mol_type = other DNA
atggaccaggaggggggcggagatggccagaaggctccttcattccagtggaggaattataaactgattgtggatcctgcactggaccccgctctccgcagaccaagccagaaggtctacagatacgacggggtgcacttctctgtgaatgactccaagtatatccctgtcgaggacctccaggacccacgatgtcacgttaggagcaaaaatcgcgacttttctttgccggtacctaaatttaagctggatgaattttatatcgggcaaattccactgaaagaagtgactttcgcccggcttaatgataacgtgcgggagactttccttaaggatatgtgccgaaaatatggtgaggtcgaagaagtggaaattttgctccatcctcggacacggaagcaccttgggctcgccagggtgctgttcacatctacaaggggcgctaaagagacagtgaaaaacttgcaccttaccagtgttatgggtaacatcatccacgcccaactcgacattaagggccaacaaagaatgaagtactatgagctgatagttaatggctcctacacccctcagacagtgcccactgggggcaaggctctgagtgaaaagttccaagggtctggggccgcaaccgaaaccgccgagtcccggagaagatcttctagcgacaccgccgcatatcccgctggcacaaccgctgtgggtactcctgggaacggcaccccctgctctcaagacacctctttcagctctagccgacaggatactccatccagtttcggtcagttcacaccccagtcaagtcaagggacgccatacacctcccgcggaagtaccccatatagccaagacagcgcttattccagcagtacgacttccacttcatttaagcctaggcgaagcgagaacagctaccaggatgccttcagcagaaggcacttcagcgcttcaagcgcatcaacaacagcttccaccgctatcgccgcgactaccgccgccaccgcaagctcaagtgcttcctcctcctccctgtcttctagttcctcaagctccagctcttccagttcatctcagttccggtcttctgacgcgaactatcccgcatactacgaaagctggaacaggtaccagagacacactagctatccacctagaagggccacaagggaggagccacccggagcgccattcgctgagaatacagctgagcgatttcccccaagttacactagctacctgccccctgagcctagcaggccaactgaccaggactatcggcccccggccagcgaggctcctcctcctgaaccacctgaacccgggggcggggggggcggcggaggcccctcaccagaacgagaggaggtgagaacgtcacctcgacctgcctccccggctcggtccggctcccctgcacctgaaacaacaaatgagtcagtgcccttcgcccagcatagtagcctcgattcacgcatcgaaatgcttcttaaggagcagcggagcaaattttcttttctggccagcgataccgaagaagaggaggagaatagttctatggttctcggagcccgagacactgggtctgaagttccctccgggtccggtcacggaccttgcactccaccacccgcaccagcaaactttgaagacgtggcacccacagggtccggcgaaccgggcgcaactcgcgaaagtcccaaagcaaacggccagaaccaggccagcccttgctctagcggagatgatatggagatctctgacgatgaccggggtggctctcctcctcctgcccccacacccccgcagcagccaccacccccacctcctccccctcccccaccaccaccttatttggccagccttcccctgggctaccccccgcatcagccagcttacttgctgccacctaggccggatggtcctccacctcctgagtatcctccaccgccacctcctccaccccacatttacgattttgtgaattcactggagctgatggatcggctgggggcccaatggggcgggatgcccatgtcttttcagatgcagactcagatgctgacacgcctgcaccagcttcgacagggaaaaggactgatcgccgcctctgccgggccgcccgggggtgcctttggagaagccttcctgccatttcctccacctcaggaagccgcttatgggctgccctatgccctttacgcccaaggccaagagggccggggagcatattctcgggaggcctatcacctgcccatgccaatggcagctgagccattgccctcatcatccgtgagcggcgaagaagcccggctccccccccgcgaggaagccgagctcgccgaaggaaaaaccctcccaactgccggcacggttggccgggtgctggccatgctggtccaagagatgaaatctatcatgcagagagacctgaaccgcaaaatggtggaaaacgtcgcgttcggcgccttcgaccagtggtgggagtccaaggaagagaaggcgaaacctttccagaatgctgctaaacagcaggctaaggaggaagataaggaaaaaaccaagctgaaagagccaggattgctttccctggtggattgggctaaatcaggcgggaccacagggatcgaggcctttgcctttggctctgggctgcgcggggcccttagattgcctagcttcaaggtcaagcgcaaataa

SEQ ID NO: 541 - DNA, 2430 bp, synthetic construct
  source 1..2430: mol_type = other DNA
gagcctagtgagatttccgaggcttccgaagaaaagagacctcggcctagtacccctgcagaggaggatgaagacgatccagaacaagagaaagaagcaggcgagccaggccgcccggggaccaagcccccaaagcgcgacgaagaacgaggaaagacccagggcaagcatcgcaaaagcttcgcgctcgatagcgaaggggaagaggcatcccaagagagctcctcagaaaaagatgaggaggatgacgaggaagatgaagaagatgaggacagggaggaagccgttgatactacaaagaaagagaccgaggtgagcgatggtgaggatgaagagtctgactctagctccaaatgcagcttgtacgcagatagcgatggggagaacgacagtacgtccgatagcgagtcctccagttccagctcctcctcttcctcctcctccagcagtagcagtagctcctccagctccagttcaagtgaatcatcctcagaggacgaagaggaggaggagcgcccagcagcgctcccaagcgcgtcccctccgccaagagaagtccctgttcctacccctgcacctgtcgaggtgcccgtcccagagcgcgtggctggttcacctgtgacaccccttcccgagcaggaggcatcccctgcccgccccgccggcccaacagaggagtcacccccttccgctcccctgcggcctcctgaacccccagcagggccccctgcccctgcccctagacctgatgaaaggccttcaagtcctataccgcttcttccaccccccaagaagcgccgaaagactgtctctttcagcgctattgaagtggtacccgcacccgagccacccccagccaccccccctcaggccaagttccctgggcccgctagccgaaaagccccccgcggcgtggagagaacaatccggaacctgccgctggaccacgcgtctcttgtcaaatcctggccggaggaggtttcaagaggcgggcgcagcagagcagggggaagagggcggctgactgaagaggaagaagccgagccaggaaccgaagtggatttggcagtactggctgatctggcgctcacccctgcaagacgcgggctgcctgccctgcccgccgtggaggacagcgaagctactgagacttccgacgaggctgaaagaccaaggccactcctcagccatattttgctcgagcacaactacgctctcgctgtgaaaccaactcctcccgctccagccctgagaccgccggaaccagtgcctgctccagcggccttgttctcttctcccgcggatgaggtgctcgaagcccccgaggtcgtcgttgctgaggcagaagagccaaagccgcagcaacttcagcagcaacgggaggaaggcgaggaggagggcgaggaggaaggagaagaggaggaagaggagtcttctgacagttctagctcatccgatggtgagggagccttgcggcgccgctcactccgctcacatgctcgacgacgcaggcctccgcctccccctcctcctcctccacctagagcatacgagccacgaagcgaattcgaacagatgaccattctgtatgatatttggaattccgggctcgatagtgaagatatgtcctacctgcgcctcacctatgagagattgctgcaacagacgagtggcgctgattggctgaacgacactcattgggtacatcacaccatcaccaatctcacgacacccaaacgcaaacggcgccctcaagatgggcccagggaacaccagacgggcagcgcaaggagcgagggatattatccgatcagtaagaaggagaaggataagtacctggatgtttgtccggtgagcgcacgccaactggaaggggtcgacacacagggaacaaaccgggtcctctccgaacggcggtccgaacagcgacggcttctgtccgcaataggaacttcagccattatggactctgatttgctcaagcttaaccaactgaaatttcggaagaaaaagctgagatttggccggtccagaatacacgagtggggccttttcgcaatggagcccattgcagctgatgaaatggtgatagagtatgtaggccaaaatatccggcagatggttgctgacatgagggagaaaagatatgtccaggaaggcattggttccagctatctgttccgggtggaccacgataccataatcgacgcaaccaaatgcggaaaccttgcccgattcattaaccactgttgcacccctaattgttacgcaaaagtgattaccatcgagagtcagaaaaagatagtgatctattccaagcagccaatcggggtcgatgaggaaatcacgtacgattataaattcccactggaggacaataaaattccgtgtctgtgtgggaccgagtcctgccgggggtccttgaactaa

SEQ ID NO: 542 - DNA, 1785 bp, synthetic construct
  source 1..1785: mol_type = other DNA
atggccgccaacatgtaccgggtcggagattacgtctactttgaaaattcctccagcaatccttatcttatacgaaggattgaggagcttaataaaaccgcttcaggcaatgtagaagcaaaggtggtctgcttctaccgccggcgcgatatttctaacacgttgattatgttggcagataaacatgctaaggagatagaggaggagtctgaaactactgtggaggctgacctgactgataaacagaagcaccagctcaagcacagagagctcttcctgagtcggcaatatgaaagccttccggccacccatatccgggggaaatgctcagttgccctccttaacgaaactgagagcgtgctcagctatctcgacaaggaggacacattcttctatagcctcgtctacgatccttctttgaaaaccctgcttgccgacaagggcgagataagagtgggcccccgctaccaggcagatatcccagagatgctcttggaaggggagtccgacgaacgcgagcagtctaaactggaggtgaaagtatgggaccccaattcaccactgacggaccgacagattgaccaattcctggttgtcgccagggccgtggggacgttcgcgagggctctcgattgcagttcttcagtgcggcagcctagcctgcatatgagtgccgcggccgcttcccgcgatattacactgtttcacgccatggataccctgtatcggcactcctacgacctgtcaagcgccatctccgtgcttgtgcccctgggcggtcccgttctgtgccgggatgagatggaggaatggagcgcttccgaagcttccctctttgaggaagcactcgagaagtacggcaaagacttcaatgacatacgccaggatttcctcccatggaaatctcttactagcatcatagaatactactacatgtggaaaacgacggatagatacgtgcagcaaaaacgcctgaaggcggccgaggccgaatctaagcttaagcaggtctacattcccacttacagtaagcccaacccaaaccagatctcaacctctaatggaaagcctggagcagtgaacggcgctgtggggactaccttccaaccacagaaccccctccttggccgggcctgcgagagttgttacgctacacaatcacaccaatggtacagctggggtcctcctaacatgcagtgtaggctgtgtgcaatctgttggctgtactggaaaaagtacggcggcctgaaaatgcccacacagtccgaggaggagaaactcagcccaagccctacaactgaagatccaagagtcagatcacacgtgagtaggcaggccatgcaaggaatgcccgttagaaatacaggttctcccaagagcgccgtcaagacaaggcaagctttctttctgcacactacttacttcactaaattcgctcggcaagtgtgtaaaaacaccctgaggctcaggcaggctgctcgacgcccattcgtggccatcaattatgcagcaattcgcgccgaatacgcggacagacacgccgagctttctggcagccccctcaagagtaaaagcactcggaagcccctggcatgtattattggatacctcgagatccatcccgctaagaagcctaatgtgatccgcagcaccccctcattgcaaacccctacaacgaagcgaatgctgactacacctaaccatactagtcttagtatccttggtaaacgcaattattctcaccacaacgggctcgatgaactcacctgctgcgtgagtgactaa

SEQ ID NO: 543 - DNA, 1215 bp, synthetic construct
  source 1..1215: mol_type = other DNA
cccaaaggcatccatgagcaggagctgtcatacttcgcagtgtttagaagggtctacgttcagcgggatgaagtgcgccaaatagccagcatcgtacagaggggcgaaagagatcatacttttcgcgtaggctctctgatctttcacaccatcggccaactgcttccgcagcagatgcaggccttccatagtccgaaggcactgttccccgttggatacgaggcgtctcgcctgtactggtctacccgctacgccaatcggagatgcagatatctgtgcagcatagaagaaaaggacggaaggcccgtctttgtaatccgcatagtggaacagggtcacgaagacctggttctgtcagatatttcccctaaaggtgtctgggacaagattttggaaccagtggcctgcgtgagaaagaaatccgagatgctgcagctgttcccagcctacctgaagggggaagatttgtttggtctgaccgtgtcagccgttgctcgaattgccgagtctcttccaggggtggaggcctgtgagaattacacattcaggtatggtcgcaacccgctcatggaactgccacttgctgtgaatcccacaggatgcgctagatcagaacccaaaatgagcgctcacgtgaaacgctttgtgcttagaccacacaccttgaattcaacgtccacatccaagagcttccagtctacagttacaggtgaacttaacgcaccctactcaaaacagttcgtgcactctaagtctagccagtatcggaaaatgaagactgagtggaagtccaatgtgtaccttgcgcgatcccggatccagggcctggggctctacgccgcacgcgacatcgagaagcacaccatggtgatcgaatacattggaactattatccgaaatgaagtggctaatcgcaaggagaagttgtacgaaagccagaatcgcggcgtgtacatgtttagaatggacaatgaccacgtcatcgacgctaccctgacaggaggaccagccaggtatataaatcacagctgcgccccaaactgcgtggctgaggttgtgactttcgaaagaggccacaagatcataataagcagtagtcgccgaattcagaaaggagaggaactctgttacgattacaaatttgattttgaggacgatcagcacaagattccttgccactgtggagccgtgaactgcaggaaatggatgaattaa

SEQ ID NO: 544 - DNA, 2907 bp, synthetic construct
  source 1..2907: mol_type = other DNA
catgggccttccatcatgaagaaaagaaggggaagctctaaaggacatgacacacacaaaggaaagcctgttaaaacaggatcaccaaccttcgtgcgagaacttcggtctcgcactttcgattcatcagatgaggtaattctcaagccaaccggtaatcagttgacagtagagttcctggaggaaaacagtttctctgtgccaatcctggtgctcaagaaggacggactcgggatgactctgccctccccatccttcacggtcagggatgtggagcactatgttggctcagacaaggagattgatgtgatagatgtcactagacaggccgattgtaagatgaagttgggagacttcgtgaaatattactactctggtaagagagagaaggtgctgaacgtgatctccctggaattcagtgatacgaggctgtccaaccttgtagagactccgaaaatcgtgcggaaactcagctgggtggagaatctctggccggaggaatgcgtttttgaaaggcccaatgtacaaaaatattgcctgatgtctgtccgggactcctacactgattttcatattgattttgggggcactagtgtgtggtatcatgtgcttaagggcgaaaagattttttatctgataaggcccaccaatgctaatctgacgctgtttgaatgttggagctccagtagcaatcagaacgagatgtttttcggcgaccaggtggataagtgctacaagtgctccgtcaaacaaggccagactttgttcatcccaactggctggatccatgctgtcctgacccccgttgactgcctggctttcggtggaaatttcctccattcactgaacatcgagatgcagttgaaagcttacgagatcgaaaaaaggctgagcaccgcggatctgtttagatttccaaattttgaaactatctgctggtatgtcggcaagcacatacttgatattttcaggggcctgcgcgaaaaccgccgccatcctgcgagttacctcgtgcacggtgggaaggctcttaacctggctttccgcgcctggaccagaaaggaggccctccccgatcacgaggatgagattcctgaaaccgttagaacagtccagctcattaaagatctggccagagaaatcagactggttgaagacatcttccaacagaatgtgggaaaaactagcaacattttcggtctccagagaatttttccagcaggttctattcccttgacaaggcccgcacactccaccagcgtgagtatgtcacggctttccctgccttcaaagaacggtagcaaaaagaaagggctgaaacctaaggagctgtttaaaaaggccgaacgcaaaggcaaagaatcctccgctctcgggcccgcgggtcagctgagttacaacctcatggatacctactctcatcaggccctgaagacaggatcttttcagaaggctaagtttaatatcaccggagcctgcctgaacgatagcgatgacgattccccggacctggacctggatggtaacgagagccctctggctttgctgatgagcaacggaagtactaagagagtgaagagcctgagtaaatcccgaagaacaaagatagctaaaaaggtggacaaggctaggcttatggccgagcaggtcatggaggatgagtttgacttggacagcgacgacgagctgcagattgatgagcgcctgggaaaagagaaggctacgttgattatccgcccaaaatttccacggaagctgcctcgcgctaagccctgctctgacccgaatagagtgcgagagcctggcgaggtggaatttgatattgaagaagattatacaacggacgaagacatggtggaaggggtggagggaaagcttggcaacggaagtggagccggaggaattctggatttgcttaaagccagccgacaggtgggaggacccgactacgctgccttgacagaagcccctgcttcaccaagcacccaagaggcgatccaggggatgctgtgcatggccaacctccagagttcctcttccagtcctgcaacatcctccttgcaggcctggtggaccggcgggcaggataggagcagcggttccagctcaagtgggctggggacagtgtctaacagccctgcctcccagcggactcctggaaaacgcccaattaagaggcctgcatattggcgcacagaatccgaggaagaagaggagaatgcatctctcgatgaacaggacagcctgggtgcttgtttcaaggacgctgaatatatttacccgagtctggaatccgacgacgatgatccagcgctcaaaagtcgacctaagaaaaagaaaaattcagacgatgcaccttggtcccctaaagctagggtcacgcccaccctgcctaaacaggaccgccccgtgcgggaaggtactcgggtcgccagtatcgaaacagggttggccgcagcagcggcaaagctggcccaacaagaattgcagaaggctcagaaaaagaaatacatcaagaagaaaccgctgctcaaagaagtcgagcagcccaggccccaggacagcaacctgtctttgactgttccagctccaactgtagcagctactccccagctggtcacatcaagctcacccctcccccccccagaacccaagcaggaggctctgtctggcagcctggctgaccacgaatacactgcccggcctaacgcctttgggatggctcaagccaatagatctactacacccatggccccaggtgtgttccttacacaaaggagacctagtgtagggagtcaaagtaatcaggccggccaaggtaagcgccctaagaagggtctcgcaactgcaaaacagcggctggggcggattctgaagatccatcggaatgggaagctgctgctctaa

SEQ ID NO: 545 - DNA, 1278 bp, synthetic construct
  source 1..1278: mol_type = other DNA
atggcatccaaggagatgtttgaagacaccgtggaagaacgagttatcaacgaggagtacaaaatttggaaaaaaaacaccccatttctgtacgacctggttatgacgcacgctcttcagtggccaagcctgacagtgcagtggctgccagaggtgactaaaccagagggtaaggactacgcacttcactggcttgtactgggcacccatacaagcgatgagcagaaccatctcgtggtggctagagtacacatcccaaacgatgatgcacagtttgacgcttcccactgtgactccgacaagggtgaatttggcggctttggctctgttacaggcaagattgagtgtgagataaagataaaccacgagggagaagtgaatagggccaggtacatgccccagaacccccacatcatagcaacaaaaacccctagctccgacgtactggtttttgactatactaaacatcctgctaaacccgatccttccggcgagtgcaatcctgatctccgcctcaggggccatcagaaagagggctatggattgtcctggaacagcaacctgtcaggccatctgctttcagcctccgatgaccacacagtctgtctgtgggatatcaacgccgggccaaaagaaggtaagatagtggatgctaaagccatcttcacaggtcattccgcagtcgtggaggatgtggcatggcacctcctgcacgaaagcttgttcggatctgtggcggatgatcagaagctgatgatctgggacacacggagcaacactacaagcaagccctctcacctggttgacgcccacactgcagaggtaaattgcttgagtttcaacccctactcagaattcatcctcgcgactggaagcgcggataagaccgtggccctttgggatctgcggaacctgaagttgaaactgcacacgttcgaatcccacaaggacgagatctttcaggtgcattggtcacctcacaacgagacaattttggcctctagcggcacagatcggcgactcaacgtgtgggacctgagtaaaatcggagaagagcagtcagcggaagatgctgaggacgggccacctgaacttctcttcatacatggtggacacaccgccaagatttccgactttagctggaatccaaacgaaccctgggttatctgcagtgttagcgaagacaacatcatgcagatctggcagatggctgaaaatatatataatgatgaggagagcgatgtgaccactagtgagcttgagggacagggatcttaa

SEQ ID NO: 546 - DNA, 1398 bp, synthetic construct
  source 1..1398: mol_type = other DNA
atgccaaaaaaggctaagcccactggctccggaaaggaggaggggccagctccctgtaagcagatgaagttggaagctgccggcggcccttcagccctgaacttcgatagtccctcttccctgtttgaaagcttgattagtcccataaagacggagacttttttcaaggaattttgggaacaaaagcctctcttgatacagagggatgatcctgccctggccacttattatggaagcctgttcaaacttaccgacctgaaatccctctgcagtcgcgggatgtattacggacgcgatgtaaatgtttgcaggtgcgttaacggcaaaaagaaagtgctcaataaggacgggaaggcccatttcctgcagcttcgaaaggactttgatcagaagagagccacaattcagttccatcagccccagagattcaaagacgagctgtggcggattcaggagaaacttgaatgctactttggctctttggtaggcagtaatgtctacattactcccgcaggatcccaaggactccccccccactatgacgacgtcgaagtatttatccttcagcttgagggggaaaagcactggcgattgtatcaccctaccgtgccactggcccgagagtatagcgtggaggccgaagagcgcatagggcgacctgtgcacgagtttatgctgaaacctggtgaccttctgtacttcccccggggtacaatccaccaggctgacaccccagccggtctcgctcacagcacccacgtgaccatttccacgtaccagaataactcctggggggatttcctgctggataccatctctggcctggtttttgatacggcaaaggaggatgtcgagttgaggacagggatcccacgccaactgcttctccaggtcgagtctactaccgtggctacccgacgactcagtggcttcttgagaacacttgctgacagactcgagggaactaaagagctcctgtcaagcgacatgaaaaaggatttcattatgcataggctcccaccctacagcgccggggatggagctgagttgtctaccccaggcggcaagctgccccgcctggactcagttgtcagactgcagtttaaggatcatatcgtcctgaccgttcttcctgatcaggatcaatctgatgaagcacaggagaaaatggtgtacatttatcacagtttgaaaaattcccgggagacacacatgatgggcaacgaagaagaaaccgagtttcacggactgcggttcccactttctcaccttgacgctcttaagcagatttggaactccccagctattagtgtcaaggacctgaagttgacaacagacgaagagaaggaaagcctggtgctgtccctgtggactgagtgcctgattcaggttgtgtaa

SEQ ID NO: 547 - DNA, 1299 bp, synthetic construct
  source 1..1299: mol_type = other DNA
agaggaatcaaatcccgatacaaagactgttccatggctgccctcacctcccatcttcaaaatcagtctaacaatagtaattggaacctccggacccggagtaagtgtaagaaagatgtgttcatgcctcccagctccagctcagagctccaggaaagcagaggcctcagcaacttcacttcaacccacttgctgcttaaggaagacgagggcgtggacgatgtcaatttcagaaaggttcggaagccaaaagggaaggtaacgatcctgaagggaattccaataaagaaaacaaagaaagggtgtcgcaaatcttgcagcgggttcgtgcagtcagacagcaaacgggagtccgtctgcaataaagctgacgctgaaagcgaacctgtagcccagaagtctcaactggatcgcactgtttgcataagtgacgccggcgcctgcggggagacactgagcgtaacctctgaggagaactccctggttaaaaagaaggaacggtctctgtcttccggatcaaatttttgctctgagcaaaaaacatcaggaattatcaacaagttctgttccgccaaggattccgaacacaatgagaagtacgaggacacatttctggagagcgaagagattggaacaaaggttgaagtggtggagaggaaagagcacctgcacactgatattctgaagagagggagcgaaatggacaataactgctccccaactcgaaaagactttaccggagaaaaaatcttccaggaggatactattccacggacacagattgagagacgcaagacttcactgtacttctcctctaagtataacaaagaagcgctgtcaccccctcggcgcaaggcgttcaaaaaatggacgccccctcggagtccttttaatcttgtgcaagaaacactgttccatgatccctggaagctcttgattgctaccatttttctgaacagaacatccggcaaaatggcaatcccggtgttgtggaagttcctggagaaatacccaagtgctgaggtcgcccgcacagctgactggagagatgttagtgagcttcttaagccgctcggcctctatgatctgcgggccaaaacaatcgtaaagttctctgacgagtacttgactaagcagtggaaataccccatagagttgcatggcataggaaaatacggcaatgactcatataggatattctgtgtgaacgagtggaaacaagtgcacccagaggaccataagttgaacaaataccacgattggctttgggagaatcatgagaagctgtctctgagttaa

SEQ ID NO: 548 - DNA, 2415 bp, synthetic construct
  source 1..2415: mol_type = other DNA
atggatctgcctgttgacgagtggaaaagttacctgcttcaaaaatgggccagtctgccgacttctgttcaggtgaccatatccaccgccgagaccctgcgggatatttttctccacagctccagcttgctccaacccgaggatgagctctttctgaagaggctctcaaaaggttacctcgtggggaaagattcagacgctcctttgttctaccgggaagaggggaacaagaagtttcaggagaaggactataccggggctgctgtgctctattctaagggagtatcacactcaagaccgaatacagaagacatgtctctgtgccatgctaatagaagtgccgcactgttccatctcggtcagtacgaaacctgcctgaaggacatcaatagagcccagactcatggatatcctgaacggctgcagcctaaaattatgctgagaaaggcagagtgccttgttgcccttgggagactgcaggaggcatcacagactatctcagatttggagcgcaactttacagcaactcccgccctcgcggacgtcctgccccagaccctgcagaggaacctccatcggcttaaaatgaaaatgcaggaaaaggatagcctcacggaaagtttccccgcggccctcgcaaaaacactggaagatgctgcattgagagaagagaacgaacagttgtcaaatgcgtcctcaagcatcggcctgtgcgtggacccactcaagggtcggtgccttgtggcaaccaaggacattctcccaggagagctgctggtgcaggaggatgcattcgtgtcagtccttaaccctggcgaactgcccccacctcatcacggactggatagtaaatgggacactagggtaactaatggagatttgtattgccatagatgtctcaagcatactctggcgacagtgccctgcgatgggtgtagctacgcaaaatattgctcacaggaatgtctgcaacaggcctgggaactctaccaccgaactgagtgtccattgggcggtctccttttgacccttggcgttttctgtcacatagccttgcggctgaccttgctggtggggtttgaggacgtgaggaaaatcataactaaactttgcgataagatatcaaacaaggacatctgtctgccagaatctaataaccaagtgaaaaccctgaactacgggctgggagaatctgaaaagaatgggaacatcgtggagacgccgattcccggttgtgatataaacggcaaatatgaaaataattacaatgctgtgttcaacctgctgccacacactgaaaatcattcccccgagcataagttcctgtgtgcactgtgtgtctccgccctgtgtcggcagctcgaggctgcatctctgcaggccattcctactgaacgaatcgttaacagttcccagctgaaagctgcagtgacgccggagctgtgccctgacgtgacaatttggggcgtggcgatgctgcgacatatgctgcagctgcagtgcaacgcacaggccatgaccaccatccagcatactggccctaagggcagtattgtgaccgatagtagacaggtgcggttggcgaccggaatttttcccgtgatctccctgctgaatcacagctgttccccaaacacatcagtctctttcattagcacggtggccaccattcgcgctagtcagcggattaggaaaggccaagaaattttgcattgttatgggccccataaaagcaggatgggggtggctgagaggcaacagaagcttcggtctcagtatttcttcgattgtgcctgtcctgcttgtcaaaccgaggctcaccggatggcggccggacctagatgggaggccttttgttgcaattcctgtggcgcccccatgcaaggagacgacgttctcaggtgcggcagcagatcttgtgcagagtcagccgtcagccgggaccacctcgtctctcgactccaagaccttcaacagcaggtccgggtggctcagaaactgctgagagatggagaacttgagagagccgtccagaggttgtctggctgtcaacgggacgcagaatccttcctgtgggccgagcatgccgtcgtgggagaaattgctgatggcctggcacgcgcttgcgcggcactgggagattggcaaaagtcagcaacacaccttcagcggtcactttatgtcgtggaagtaaggcacggcccatccagtgtcgagatggggcacgaactgtttaaactggcacagattttcttcaatggtttcgcggtacccgaggccctgtctactatccagaaagcagaagaagtgctgtctctgcattgtggaccatgggacgacgaaatccaagagctgcagaagatgaagtcatgcttgctggacctgccaccgactcctgtcgggcccgccctgtaa

SEQ ID NO: 549 - DNA, 843 bp, synthetic construct
  source 1..843: mol_type = other DNA
atgctgggacagcagcagcagcagttgtactctagtgcggcccttctgaccggcgagcggagccgccttttgacatgttacgtccaggactacctggagtgtgtggaatcccttcctcacgatatgcagaggaatgtgagcgtgctgcgggaattggacaataagtatcaggagacgctgaaggagatcgatgacgtatacgagaagtacaaaaaagaagatgacctcaatcagaagaagagattgcagcagctgttgcagcgcgctctgatcaacagccaggaactgggagatgaaaagattcagatagtgacgcagatgcttgagctggtggaaaatagagcccggcagatggaactgcactctcagtgctttcaggaccccgcagaatctgagcgggcttccgataaagctaagatggattcttctcaacccgagaggagctccagaagacctagaaggcagcggacttctgaatccagggatttgtgtcatatggccaatggcattgaagactgtgatgaccagccacctaaggagaaaaagtctaagagtgcgaagaaaaagaagagaagcaaagcaaaacaggagagagaagccagtccagttgaattcgcaatcgatcccaacgaacccacgtactgcctgtgtaatcaggtatcatatggcgagatgatcggctgcgacaacgagcagtgtcccatagaatggtttcacttcagttgcgtgagtctgacctacaagccaaagggcaaatggtattgtcccaagtgccgcggagacaatgaaaaaaccatggataagtctacggaaaagacgaaaaaagacaggaggtccagataa

SEQ ID NO: 550 - DNA, 1116 bp, synthetic construct
  source 1..1116: mol_type = other DNA
atggccgcggccgaggctgctaattgcattatggagaactttgtggccaccctcgccaatggcatgtctctccagcccccgctcgaggaggtgtcctgtgggcaggcagagagtagtgagaagcctaatgccgaggacatgaccagcaaagactactactttgatagctacgctcactttggcatacacgaggagatgttgaaggatgaagtccgcacactcacttatcgaaacagcatgttccataatcgccacctcttcaaagataaagtcgtacttgatgttggaagtggcaccgggattttgtgcatgtttgccgctaaagctggcgccaggaaggtcatagggatagaatgcagtagcatcagtgactacgcggtgaagattgtaaaagcaaacaagttggatcatgtggtcacaattatcaaggggaaagtagaagaggtcgaattgccggttgaaaaagtcgacataatcatttcagagtggatggggtactgcctgttctacgaatccatgctgaataccgtgctctacgctcgggacaagtggctggcccccgatggcctgatcttccccgaccgggccacactctatgtaactgctattgaagaccgacaatataaggattacaagatccattggtgggaaaatgtctacggctttgatatgtcctgtattaaagacgtagccatcaaggaaccccttgtcgatgtggttgaccccaaacagctggtcaccaacgcctgcctgattaaagaggttgatatttataccgtgaaggtggaggatcttacattcaccagcccattttgccttcaggttaaacgcaacgattatgttcacgctctggtggcttatttcaacattgagtttacgagatgccacaagcgaacgggtttttcaacatcaccagaatccccctatacacattggaagcagacggttttctatatggaggattacctgacagtgaagacaggcgaggaaatctttggaacgataggaatgcgaccaaacgccaagaacaatcgcgatctggatttcacaatcgacctggacttcaaaggacagctgtgcgagctgtcctgcagcacagactatcggatgagataa

SEQ ID NO: 551 - DNA, 1797 bp, synthetic construct
  source 1..1797: mol_type = other DNA
atgacctttcaggcttctcatcgcagtgcttggggcaagtctcgcaagaagaactggcagtatgaaggccccacacagaagctctttctgaagaggaacaatgtatcagccccagacggcccatccgatccttctatctccgtgagctctgagcaatccggggcccagcagcctcctgctctccaagtggagcgcattgtggacaagaggaagaataagaaagggaagaccgagtatcttgtacggtggaagggatatgactccgaggacgacacttgggaaccggagcagcatttggtcaactgcgaggaatatattcacgatttcaacaggagacacacagaaaagcaaaaggaatccacgcttactcgaacgaatcggactagccctaataatgccagaaagcaaatctctagatccacaaattctaatttcagcaaaacttccccaaaggcgctcgttatcggtaaggatcatgagtcaaagaattctcagctcttcgccgcgagtcaaaaattccggaaaaatactgcgcccagtcttagcagcagaaaaaatatggacctggcaaaatctggaattaagatcttggtcccaaaatcacctgtgaaaagtcgaaccgctgtggatggctttcagtctgagtcacctgagaaactcgaccctgtggaacaagggcaagaggatacggttgcccctgaggtcgctgcagaaaaaccagtcggcgcactcttgggaccaggtgcagagcgcgctcgcatgggcagccgcccccgcatacatccccttgtcccacaggtgcccggtccggtgactgcagccatggcaacgggactggctgtgaatgggaaaggaacatccccgtttatggacgctcttaccgcaaacggtaccactaatatacagaccagtgttaccggcgtcaccgccagcaaaaggaagttcatagacgacaggcgagatcaacctttcgacaaaagattgagattctctgtgaggcagacagaatccgcataccgataccgggacatcgttgtccgaaagcaggacggatttacccacattttgctgagtacaaagagttctgagaataactctctgaatcctgaggtcatgagggaggtccaatccgcactctcaaccgccgccgcagacgattctaaactcgtgcttctgagtgcagtggggagtgtcttttgctgcgggttggatttcatttacttcattcgccgcctcaccgacgaccgcaagcgcgaatccaccaagatggccgaggccattcgcaattttgtaaacacttttatccaatttaagaagcccataattgtggcagtgaatgggcctgccattggactgggtgcctctatcttgcccctgtgcgacgtagtgtgggccaacgaaaaggcctggtttcagaccccttacacaactttcgggcagtcaccagatggctgtagtacagtcatgtttccaaagattatgggaggagctagtgccaatgagatgttgctgtccggacgcaagctgaccgctcaggaagcttgcggtaaaggactggtctctcaggtgttctggccggggacattcacccaggaggtgatggtcagaatcaaggagctcgccagttgtaatccagtcgttctggaagagtctaaagcgttggttaggtgtaacatgaagatggagctcgaacaggccaatgagagggagtgcgaggtgctcaagaagatatggggctctgctcagggcatggacagtatgctgaaatacttgcagcgcaagatagacgagttctaa

SEQ ID NO: 552 - DNA, 2010 bp, synthetic construct
  source 1..2010: mol_type = other DNA
tacaaggctaaggagaggaaatcctcaagggataaggagttgtatgcctggatgaagtgcgtcaagggacagcctcacgatcataagcatctcatgccaactcagattatcccgggaagcgtactcacagatcttctggacgcgatgcatacccttagggaaaagtatgggatcaagtcccactgccattgtaccaataagcaaaatcttcaggtgggtaatttccccacgatgaatggtgtgtcacaagtccttcaaaatgtgctgaaccacagtaacaagatttcactctgtatgcctgagtcccagcagcagaacacgcccccaaagtcagagaagaatggtggtagcagtccagaaagcgacgtggggaccgacaacaagctcaccccacccgagtcccagagccctctgcactggctcgcagacctggcagagcagaaagctagagaggagaagaaagagaataaggagctgacccttgaaaaccaaattaaggaagaaagagagcaggataattcagaatctcccaatggtcggacaagccctctggtgagtcagaacaacgaacagggatccactctcagagatcttctgacaacaaccgccggcaagctgcgggtgggctccaccgatgctggtattgcatttgctccagtctacagcatgggagccccttccagtaaatccggacggactatgcctaacattcttgatgacattattgctagcgttgtcgagaataagatcccccctagcaagaccagtaaaattaatgtgaaaccagagttgaaggaagaacctgaagaaagcatcatcagtgccgtggacgagaataataaactgtacagtgatattccacattcctggatctgtgaaaaacatatcctgtggctgaaggattacaagaattcaagtaattggaagctgttcaaggaatgttggaagcagggtcagcccgcagtcgtgagcggtgtccataaaaagatgaatatcagcctgtggaaggctgagtccataagtttggactttggcgaccatcaggccgatctgctcaattgtaaggactcaattataagcaatgccaacgtgaaggagttctgggatggctttgaggaagttagtaagaggcagaaaaacaagtcaggcgagaccgtagttctgaagttgaaggattggcccagcggtgaggatttcaaaacaatgatgcccgcccggtacgaggatctcctgaagtcactgcctctcccagaatactgcaaccctgaaggcaagttcaacctggcgtcacatctgcccggatttttcgtgaggcccgacctcgggccccggctttgcagcgcttacggggtggtggccgccaaagaccacgatattgggacaacgaatctccatatagaagtgtctgacgttgtgaatatcctggtgtatgtcggtattgccaaggggaatggaattctgagcaaggccggaattctcaaaaaatttgaggaggaagatttggatgacatcctgcggaaacgccttaaagattctagtgagatccctggcgccctctggcatatctacgccggaaaggacgtggataagattagagaatttctgcagaagatcagcaaggagcagggcctggaggtcctcccagagcacgatccaatccgcgaccagagttggtacgttaacaagaagctgaggcaacgactgctggaagaatacggggtgcgcacctgtaccctgatccaattccttggggacgccatagtcctgcccgccggagctctccaccaggtgcagaactttcattcttgtatacaagttactgaggacttcgtgagtcccgagcatctggtcgaatcattccacctcacccaggaactgagattgctcaaggaagaaattaattacgatgacaagttgcaggtgaagaacatcctctaccacgcagtgaaggagatggtgcgggccctgaagatccatgaggacgaagtggaagatatggaggagaattaa

SEQ ID NO: 553 - DNA, 1572 bp, synthetic construct
  source 1..1572: mol_type = other DNA
atggagactatgaagagcaaagccaactgcgcccagaaccctaactgcaatatcatgatattccatcccaccaaagaagagttcaatgacttcgataagtacatcgcatacatggagtctcagggtgcccatcgcgcaggtctggctaaaattattccgccgaaagagtggaaggccagagaaacgtacgacaacattagcgagattctgattgctacaccactccaacaggtggctagcggacgcgccggagtgtttactcagtaccataaaaagaaaaaggccatgaccgtgggcgagtacaggcatctcgcaaatagcaagaagtatcagacaccaccacaccagaactttgaggacctcgagagaaagtattggaagaataggatatataactcccccatttacggggccgacattagcggcagccttttcgacgagaacactaagcagtggaatttgggacacttgggaaccatacaggatttgcttgagaaagaatgcggagtggtaattgaaggcgtaaataccccctacctctattttggcatgtggaaaacaactttcgcgtggcacactgaggacatggacctgtactccattaactatcttcatcttggggagccgaagacgtggtatgtggtccctcccgaacacggccagcggctggaaagattggcccgcgagctgtttcccggtagctccagaggttgcggcgcatttctgaggcataaagtggccctgataagcccaaccgtcctgaaagaaaatggcattccattcaatcgcatcacccaagaagccggagaattcatggtgactttcccttatgggtatcatgcaggattcaaccatggcttcaattgtgctgaagctatcaacttcgcaacacctagatggatagattacggaaaaatggcgtcacagtgcagttgtggggaagcccgagtgacctttagcatggatgcgtttgtgcgcatacttcagcccgagagatacgacctttggaagagaggtcaggatcgggccgtggtggaccacatggagccacgggtccctgcttcacaggagctgtccactcagaaggaggtgcaactgcccagacgcgccgcactggggttgaggcagctcccaagtcattgggcgcggcattctccttggccaatggctgccagatcaggtacacggtgccatactctggtgtgcagtagccttcccagacggagtgctgtgagcggaacagccactcagccaagagccgccgctgtccacagctccaaaaagcccagtagcacccctagttccacgccggggccttccgcacagattattcacccaagcaacggcaggaggggcagagggcggcccccacaaaaactgcgggcccaggaactgactctgcagacccctgcaaaacgaccgctcttggcagggaccacttgtacagcatccggccctgaaccagagcccctccccgaggatggtgccctcatggacaagcctgtgcccctgagtccaggtctgcaacatcctgtgaaagccagcggctgttcttgggcccctgtgccttaa

SEQ ID NO: 554 - DNA, 1269 bp, synthetic construct
  source 1..1269: mol_type = other DNA
atgagcttcgtggagtgcccctatcattctccggcagaacggctcgtagcggaagctgacgaaggcgggccctcagctattaccggaatgggactgtgctttaggtgtctgctctttagctttagtgggcggtccggagtcgagggcggacgagtggacctcaatgtgttcggttcattggggctgcagccatggattggtagctctcgctgttggggaggcccgtgctcttcagcactccgatgtggttggtttagctcttggcctcctccaagcaaaagcgcaatccctatcggaggcggtagtcggggtgcagggcgcgtctcccgctggccccccccacattggctggaagcctggcgagtttctcctttgcctctgagtcccctctctccagcgactttcggacggggctttatcgctgttgccgtcatccccgggctgtgggcccggggccggggctgctcctctgaccgcctcccccggcctgccgggccagcccggcggcagtttcaagccgcaagtctcctgaccagaggctggggccgcgcctggccgtggaaacagatccttaaggaactcgatgagtgctacgagcgattctcccgcgagaccgatggtgcccagaaaagaaggatgcttcactgtgtgcaaagggcactgattcgcagccaggagttgggcgacgagaaaatacaaattgtttctcagatggttgagttggtcgaaaatcgcacccggcaggtggactcacacgtcgaactttttgaggcccagcaggagcttggggacactgccggaaacagcggcaaggcaggcgcagaccggccaaaaggggaggcagcggcccaggcagacaagcctaacagcaaaagaagccggagacagaggaacaacgaaaatcgggagaacgcctctagtaatcatgaccacgatgatggagcttccggtaccccaaaagaaaagaaagcaaagactagcaagaaaaaaaagcgatccaaagccaaagctgaacgggaggcctctccagccgatctgcccattgatccgaatgagccaacctactgcctgtgcaatcaagtctcatacggagagatgatcggttgtgataatgacgagtgcccgatcgaatggtttcactttagctgtgtagggttgaatcacaagcccaaaggcaaatggtactgtcctaagtgccggggggaaaatgagaagacgatggataaagctctcgaaaagagtaaaaaagaacgcgcctataacagataa

SEQ ID NO: 555 - DNA, 1785 bp, synthetic construct
  source 1..1785: mol_type = other DNA
atgggaaagaaatcccgggtgaaaactcagaagtctggtaccggagcaaccgccacagtcagtcccaaagaaattcttaacctcaccagcgagctcctgcagaaatgtagtagtccagcaccaggcccaggcaaagagtgggaggagtacgtccaaattaggactctggtggaaaagatccgaaaaaagcagaaagggcttagcgtgacgtttgacggcaaacgggaggattatttccccgaccttatgaagtgggcctcagaaaatggcgcctccgtagaagggttcgagatggtgaacttcaaagaggagggatttggtctgcgagctactagggatatcaaggctgaggagctctttttgtgggtacccagaaagttgcttatgactgtggagagtgcaaaaaatagtgttctcggcccgctctactctcaggaccgcattttgcaggccatgggtaacattgcgctcgcattccacctgttgtgtgaaagagccagccccaactctttttggcaaccctacatccaaacgctcccctctgaatacgacacgccgctttacttcgaagaagatgaagttagatatctgcagtcaacccaagctatccacgatgtctttagccaatataagaacacagcgagacagtatgcgtatttctataaagttatccagacacatccgcacgcaaacaagcttcctctcaaagactccttcacatatgaggattatcgctgggccgtttcaagtgtgatgaccagacagaaccagatacccacagaggatggatcacgggtgactctggccctgataccactgtgggacatgtgcaatcacacgaatggcttgatcaccactgggtacaacctggaggatgatcggtgcgaatgtgtcgctctccaggattttcgggcaggcgagcagatctacatcttttacggcacccggagcaacgcagagttcgtgattcattcaggattttttttcgacaacaatagccatgaccgagtgaagattaaactcggcgtgtccaagagcgatagactgtacgccatgaaggccgaggtcttggctcgggctggcattcctacctcctcagtttttgccctgcatttcaccgagccgcctatatcagcccaactgctcgcatttctgagggtgttctgcatgacagaggaagaactgaaggagcacctgcttggggactctgcaattgacaggattttcaccctgggcaattctgagttcccagtgagttgggacaacgaggtgaagctgtggacattcctggaagacagagcatccctgttgctcaagacctacaaaacaacgatcgaggaggacaagtcagttttgaagaaccatgacctgagcgtgagggccaaaatggccataaagttgcgactgggagagaaggaaattttggagaaggccgtgaagtctgccgccgtgaacagggaatactacaggcagcagatggaagagaaagcacctctccccaaatacgaggaaagtaacttgggattgttggaatcctccgttggtgactctagactgcctctggtactgcggaatctggaagaagaagcaggggtgcaggatgctctgaatatccgggaggcgatttcaaaagcgaaggccactgaaaacggactcgtcaatggcgaaaattcaatcccgaacggcaccagatctgaaaatgaatccttgaatcaggaatccaaacgggcagtggaagatgctaagggctcctccagcgactctactgcaggcgtgaaagaataa

SEQ ID NO: 556 - DNA, 2148 bp, synthetic construct
  source 1..2148: mol_type = other DNA
atggccgccaatatgtacagagtgggagactatgtttactttgagaattcaagctctaatccttatcttatccggagaatcgaggagctgaacaagaccgcaaatggcaacgtagaggccaaagtggtctgtttctatcggcggcgagatataagttctacacttatcgccctcgctgataaacacgccactctctctgtctgttataaggctggccccggtgccgataacggggaggagggagagatcgaagaagagatggagaatcctgagatggtggacctgcctgagaagctcaagcatcagctcaggcaccgagaactcttcctgtcaaggcagctcgaatcccttccggctacacacattcgaggcaaatgttccgtgaccttgctgaatgagactgagagcttgaagagctacctggagcgggaagacttctttttttacagccttgtctatgatccacagcaaaagacactcctggcagataaaggggaaatcagggtgggaaacaggtaccaagcagacattacggatctcctgaaggagggggaggaagacggcagggatcaaagcaggctggaaacacaagtttgggaggcacacaatccactgaccgacaaacagatcgaccagtttcttgtggtggccaggtcagtgggaacttttgcgagggccctcgactgcagttcaagtgtacgccagccatccctgcatatgtcagctgcagccgcctccagggatattaccctttttcacgcaatggacactctgcacaagaacatctacgacatttccaaggcgatttctgccctggttccacagggtggacccgtcctctgtcgagacgaaatggaagagtggtcagcttctgaggccaatctttttgaagaggccctggaaaagtatggaaaggacttcacagacatccagcaggacttcctgccgtggaaatcacttactagcataatcgagtactattacatgtggaaaaccactgacaggtacgtgcagcagaagcggctcaaggctgccgaagctgagtccaagttgaaacaggtgtacattccaaactacaacaagcccaacccaaaccagatctccgtcaataacgtaaaggcaggggtggtgaacgggactggcgccccaggacaaagtccaggcgctggccgggcgtgtgaatcatgttacaccacacagtcctaccagtggtattcttggggcccaccaaatatgcagtgccgcctgtgcgccagctgctggacatactggaaaaaatacgggggactcaaaatgcccacccgcttggacggggagagacccgggccaaatcggagtaacatgtccccgcatggattgccagcaagaagcagcggctcccctaagtttgctatgaagactagacaggcattttatctgcacacaacaaagcttactcggattgctaggcgcctttgcagggaaattctgagaccctggcacgccgcccggcatccctacctgccgattaactccgctgccatcaaggcggagtgcacagctaggcttcccgaggctagtcaaagtccactcgtccttaaacaagcagtccgaaagcccctcgaggctgtactgcgatatcttgagacccatcctagacctcccaagccagatccggtaaaatctgtgtccagcgtcctgtcttctctcacaccagcgaaggtggctcccgtgattaacaatggcagccctactattcttggcaaaagatcctacgaacagcacaacggggtcgatgggaatatgaagaaaagattgctgatgccctctaggggcctggccaatcatgggcaggcccgccacatgggtcctagtcgcaatctgttgctgaatggaaaatcatacccaactaaagtgaggctcatccggggaggcagtctcccacctgtgaaacgcaggcgcatgaattggattgacgcccctgatgatgtgttctatatggccactgaagagactaggaagattaggaagcttttgtcctcaagtgagacgaagagggccgctcgaaggccttataagcctattgccctcagacagagccaggcactcccaccccgaccacctcctccggcacccgtgaacgacgagcccatcgttatcgaagactaa

SEQ ID NO: 557 - DNA, 1239 bp, synthetic construct
  source 1..1239: mol_type = other DNA
atggccgaaaatctgaaggggtgttcagtgtgctgcaagtctagttggaatcagctgcaggacttgtgtagattggccaagctgagctgcccggcactggggatttctaaaaggaatctgtatgattttgaggttgagtacctttgcgactataagaagatcagggagcaggagtactatctcgttaagtggaggggctatccagactcagagtcaacctgggaacccagacagaaccttaagtgtgtgagaattctgaagcaattccataaggacctggaacgggaactgttgagaaggcatcaccgcagtaaaactccgcgccatctggaccctagcctggcaaattacctggtccagaaagccaagcagagacgggcgctgaggcggtgggagcaggagcttaatgctaagcggtctcacctcgggaggattaccgtcgagaacgaggtggaccttgatggcccaccaagggcttttgtgtatatcaatgagtatcgggtcggggaaggaatcaccctgaaccaggtcgcagtgggatgcgagtgtcaggattgcttgtgggctccaacaggcggatgttgtccaggggccagcctgcataagtttgcctacaatgatcaggggcaggtccgactgcgagctggactgcccatttacgagtgtaattcacgctgtcggtgcggctatgactgtccaaatagggtcgttcagaagggcatcagatatgatctgtgcatctttcgcacggacgatggcagaggctggggtgtgaggactctggagaaaatccgcaaaaattctttcgtaatggaatacgtaggtgaaatcatcactagcgaagaggccgaaagacggggccaaatttacgaccgccagggtgccacttatttgttcgacttggattacgttgaggacgtttacacggtagacgcagcctactacggaaatatctcccattttgtaaaccattcatgcgatcctaacctgcaggtttacaacgtgtttatagataatctcgatgagcgactgcctaggatagcatttttcgctaccagaacaatcagagcaggtgaagagctgactttcgattacaacatgcaggttgaccccgtggacatggagagcacccgcatggattcaaacttcgggttggcaggcctcccaggttcaccgaagaagagagttagaatcgagtgtaaatgcggcaccgagagttgccgaaaatacttgttttaa

SEQ ID NO: 558 - DNA, 738 bp, synthetic construct
  source 1..738: mol_type = other DNA
ggatcaggcgccgaaggcgatggtggctggcgcccgggaggccccggagccgtcgccgaagaggaaagatgtacggtggaacgacgagctgacctgacttatgccgaattcgtccagcagtacgcttttgtgagaccagtcatccttcaagggcttacggacaacagtcgcttccgcgccctgtgctctagggaccggctgctggcctcttttggcgaccgggtagttcgcctgtcaactgcaaacacttacagctaccataaggtggacctgccttttcaggaatacgtggagcagttgcttcatcctcaggacccgacttcactggggaacgacactctgtatttctttggggataacaattttaccgagtgggctagtctttttaggcactactcaccccctccatttggcctcttggggaccgcaccagcctacagtttcggtattgccggggcaggatctggagtgccttttcactggcatggaccgggttacagcgaggttatttacggacgcaagagatggttcctgtatcccccagagaaaactcctgaattccaccctaacaaaacaaccctggcctggctgagggatacttatccggctctgccaccctccgcaaggccattggaatgtaccataagagcgggggaggttctgtacttccccgatcggtggtggcacgccacactcaatctggacacaagcgtttttatttcaacctttttgggctaa

SEQ ID NO: 559 - DNA, 1080 bp, synthetic construct
  source 1..1080: mol_type = other DNA
atgctgtacttggaggattatttggagatgatcgaacagctgccaatggatttgcgggacagatttaccgagatgagggagatggacctccaggtgcagaacgccatggatcaactcgagcagagagtgagcgagttttttatgaatgccaagaagaacaaaccagagtggcgcgaagaacaaatggcctcaattaagaaggattactataaagccttggaagacgcggacgaaaaggtacagctggccaaccagatctacgatctcgtagacaggcatctgcgcaagcttgaccaggagctggcaaaattcaaaatggagctggaagcggataacgcggggattactgagattctggagagacgctctctggaactcgatacgccatcccagcccgtgaataaccatcacgcacattctcacacacctgtagagaagcgaaaatacaaccccacatcccatcatactaccaccgatcacatccctgagaagaagtttaaatctgaagccctgctcagtaccctgactagcgatgccagtaaagaaaacaccctgggatgtcgaaacaataactccacggcctcctctaacaacgcctataacgtgaattctagccagcccctgggttcctataacatcggtagcttgtccagcggaactggcgcgggcgcgataactatggccgctgctcaggcagtgcaggctaccgcacagatgaaggagggacgacggaccagtagtcttaaggcttcttatgaggccttcaagaataacgactttcagttgggcaaagagttctccatggctcgcgaaacagttggttactcctcctcttctgcactgatgactaccctcacacaaaacgcctcttcctctgctgccgattcacgatctggaagaaagagtaagaacaataataagtcctcaagtcagcaatcaagctctagctcatctagctcatctctgagcagctgtagctcttcttctaccgtagtgcaggagataagtcagcaaaccacagtcgttccagagagcgattcaaactcccaggtggactggacctacgatcccaatgagtaa

SEQ ID NO: 560 - DNA, 1824 bp, synthetic construct
  source 1..1824: mol_type = other DNA
atggcggcgaacgtattcccgtttcgcgatgcacgggccgctcccgaccctgttctggaggccggtcctgttgcacatgggcctctgccagtgcctcttgtgctggacaatggctccttccaggtgcgcgccgggtgggcctgtcccggccaggaccctgggcctgaaccccgcctgcagtttagggcggtgtgtgcccggggccgcggaggagcaaggggagcgtccggcccacaggtcggaaacgccttgggaagtctggagccgctccgctggatgctccgcagcccattcgataggaacgtgccagtgaacctggagcttcaggagttgttgctggattacagctttcagcatctgggcgtgtccagccagggttgcgtggatcacccgatcgtgctcacggaagctgtgtgtaatcccctctattcccgccagatgatgtccgagcttctcttcgagtgctacggaatccccaaggtcgcttatggtattgacagtctctttagcttctaccacaacaaaccgaagaatagtatgtgctctgggcttattatcagctccggttaccaatgtacacacgtcctgcccatcctcgagggcaggttggacgcaaaaaactgcaagcgaattaacctgggcggctcacaggctgctggttatctgcagcggctgctgcaacttaaatatcccggacacctggccgcaataactctcagcaggatggaggagattctgcatgagcattcctatatcgcagaggactatgtcgaggagcttcacaaatggcgctgcccagactattatgaaaacaatgtgcataagatgcagcttcctttcagttcaaaattgttgggatccacactcacctctgaggagaagcaggagcggcgacagcaacagctccgccggctgcaagagttgaacgcccgccgccgggaggagaagttgcagctcgatcaggaacggctggataggctcctgtacgtccaggagctgttggaggatggtcagatggaccagtttcacaaagcgctgattgagctgaatatggattctcccgaggagcttcagtcttacatccagaagctgtccatagccgtggaacaagccaaacagaagatcctccaggctgaggtgaacctggaggtggatgtagtggatagtaaacctgagacccctgacctggaacagctcgagcccagtttggaggatgtggaaagtatgaatgactttgaccccctgttctctgaggagacacccggagtggaaaaacccgtgacaacggttcagccggtcttcaacctcgcggcataccatcaacttttcgtgggtaccgagcggatcagggctcccgagatcatattccagcctagtttgatcggcgaggagcaagcagggatcgccgagacccttcagtatattctggatcgctacccaaaagacatccaggaaatgctcgtgcagaatgtttttctgactggaggcaatacaatgtacccaggcatgaaggccagaatggagaaggagttgctcgagatgcggcctttccggtcaagctttcaggtacagctggcttccaatccagtgttggacgcctggtacggagcccgggattgggcccttaaccatttggatgacaacgaagtctggattacgagaaaggagtacgaagagaagggcggagagtatctgaaggagcactgtgcttctaatatttacgtgccaattcgcctccctaaacaggcttctcggtcctccgacgctcaggccagtagcaagggctctgctgctgggggaggcggggccggcgagcaggcctaa

SEQ ID NO: 561 - DNA, 1818 bp, synthetic construct
  source 1..1818: mol_type = other DNA
atggctgggccgcaaatgggcggcagcgccgaggatcacccgccgaggaagcgccacgcagcagagaaacagaagaagaagaccgttatctacacaaaatgcttcgaattcgaatctgccacccagaggcccatcgacagacaacgatatgatgaaaatgaggatctgtctgatgtggaggagatcgtctcagtcagagggttctcactcgaagagaaactgagaagccaactctatcaaggggatttcgtgcacgcgatggaggggaaagatttcaattatgagtatgtgcagagagaggctctgcgagtccccttgattttccgcgagaaggacggccttgggattaaaatgccagatcctgattttactgtgagggatgtcaagctcctggtcgggagtcggaggcttgtcgacgtcatggatgtcaacacccaaaaagggacagagatgtctatgtcacagttcgtccggtactatgaaacccccgaagctcagcgggacaagttgtacaacgtgatctctctggagttctcacataccaaactggagcatctcgttaaacgacccacagtggtggacctggttgattgggtcgataacatgtggcctcagcaccttaaagagaagcagacagaagcgacaaacgctatcgcagagatgaaatatccgaaagttaagaagtattgcctgatgtctgtgaagggctgttttaccgactttcacatcgacttcggggggacttctgtgtggtatcatgtgtttaggggcggaaagatcttctggctgatacccccgaccttgcataatcttgccctttacgaagaatgggtgctgagtgggaaacagagcgacattttcctgggggatagagtggaaagatgtcaacgcattgaactcaagcaagggtacactttcttcatcccaagtggatggatccatgcagtctataccccagtggactctctggtcttcggcggcaacatcctgcactcatttaacgtccccatgcagctgcgcatctacgaaatcgaagacagaactcgcgtccagcctaaattcaggtatccattttactacgagatgtgttggtacgttctggagcgctatgtttactgtgtaacacagaggagtcatctcacacaagaatatcagagagagagtatgctcattgatgcgccccgaaagcccagtattgacggcttttcttctgattcatggctcgagatggaagaggaggcctgcgatcagcaaccccaggaggaggaggaaaaagacgaagaaggtgaaggccgcgatagggcaccgaaacctccaacggatgggtctacgtctccgacttctacaccctccgaagaccaagaagcacttgggaaaaagcccaaagcccccgccctgcgattcctcaaacggaccctttctaacgagagcgaagaaagcgtgaagtctacgaccctggccgtggactatcctaagacaccaactggcagcccagctactgaagtctctgccaaatggacacatctgaccgaattcgagctgaagggtctgaaagcattggtggaaaagctggaatccctgcctgaaaataaaaaatgtgtgcccgaggggatcgaagatccacaagccctgttggagggcgtcaagaatgttttgaaagaacatgccgacgatgacccctccctcgctattactggcgtgcccgttgtcacatggccaaaaaagaccccaaaaaaccgggctgtgggtcggcccaagggaaagctgggtccggccagtgctgtcaagctggccgctaaccggaccaccgctggttaa

SEQ ID NO: 562 - DNA, 1836 bp, synthetic construct
  source 1..1836: mol_type = other DNA
ggcaagactggaaaacagaagaggggacccggatttaagtacgccagtaacctcccaggatctttgctgaaagagcaaaagatgaaccgcgataacaaagaaggacaggagccagccaagaggagatctgagtgcgaagaggctcctagaagaaggagcgacgaacattctaaaaaggtcccccctgacggtttgctcagacgcaaatctgacgatgtccacttgcggaaaaagcgcaaatacgagaagccacaggaactgtccggacggaagcgcgcttccagtctccaaaccagcccaggcagctcttcccacctgagtccacggcctcccctcggttcctccctgtccccttggtggagaagctccctcacctatttccagcagcagttgaagcccggcaaggaagacaagctgttccggaagaagcgcagatcttggaaaaatgccgaagaccgcatggccctggccaacaagcccttgcggcgatttaaacaggaacctgaggatgaactgcctgaagctcctcctaaaacaagagagtccgaccatagccgctcaagttctcccactgctgggccttctaccgagggtgctgaggggccagaggagaagaagaaagttaagatgagacgcaagaggcgcctgccaaacaaagagctctcccgcgaactctcaaaggagctgaatcatgagattcagcgaactgagaactccttggcgaatgaaaatcaacagcccattaaatcagagcccgaatcagagggtgaagaacccaagcggcctcccggtatctgtgaacgcccccacaggttttcaaagggccttaatgggactccaagagaactcagacaccagctgggtccctctttgaggagcccccctcgcgtgatttcacgcccccctccaagcgtgtccccacccaagtgcatacaaatggaacggcacgtgataaggcctcccccgattagccctcctcctgacagcttgcccttggacgacggagccgcccacgttatgcacagggaggtgtggatggcagtgttttcttacctgtcacaccaggatctttgtgtgtgtatgcgagtgtgcagaacttggaacaggtggtgttgtgataagcggctgtggaccagaatcgaccttaatcattgcaaaagcatcacaccacttatgctttccggaatcattagaagacagcccgttagcttggatctctcttggacaaatatcagcaagaagcagctgtcctggctcattaataggttgccaggtctgcgcgatttggtgctcagcggttgctcctggattgcagtgtccgctctgtgtagctcctcctgccctctgctccggacactcgatgtccagtgggtggagggattgaaggacgctcagatgagggacttgctgagccctcctactgacaaccggcccggccagatggataatcggtcaaagcttcgcaatattgtcgaactcagacttgctggcctcgacataacggacgcatctctgagactcatcatccggcatatgccactgttgagcaaacttcacctgagctattgtaaccacgtgactgaccagtcaattaacctcctgactgccgttggcactacaacaagagactcactcactgagattaatctctccgattgcaataaggtcactgaccagtgcctgtcctttttcaaacgctgcgggaacatctgtcatatagacctccgctactgtaaacaggtgaccaaagaaggctgtgagcagttcatcgccgagatgtctgtgtctgttcagtttggacaggtagaggagaaactcctccagaagttgagctaa

SEQ ID NO: 563 - DNA, 3165 bp, synthetic construct
  source 1..3165: mol_type = other DNA
atggagcaggataccgcagctgtggccgccaccgtggcagcggcagacgccaccgcgacgatagtggtcatcgaagatgaacagcccggcccctccacatcacaagaagaaggagccgccgccgcggcaacagaggccaccgccgccacagaaaagggtgagaagaagaaggaaaaaaatgtttcatctttccagcttaaacttgctgcaaaagcccccaaaagtgaaaaagagatggaccctgagtacgaggaaaaaatgaaagctgacagagctaagcggttcgagttcttgcttaagcagacagaattgttcgcccacttcatccagcccagtgctcaaaagtcaccgactagtcctttgaacatgaaactggggagaccgcggattaaaaaggacgaaaaacagagcctgattagtgctggagactaccgccacagacggactgagcaagaggaagacgaagaattgctttccgagtcaagaaagaccagtaatgtgtgtataagattcgaggtgtcacccagttatgtaaaagggggtccacttagagattaccagattaggggtcttaattggctcattagcctgtacgaaaacggtgtaaacggaatcctggccgacgaaatgggcctgggcaagacgctgcagactatcgctcttctcggctacttgaagcattacaggaacatccccgggcctcacatggtgctcgtaccaaagtccacccttcacaattggatgaacgagtttaaaaggtgggtgccgtccctgcgagtaatatgtttcgtcggtgataaagatgcacgggccgctttcattagagatgagatgatgcctggggaatgggacgtatgtgtcacctcttacgagatggtgatcaaggagaaatccgtgtttaagaagtttcactggagatacctggtgattgacgaagctcaccgcattaagaatgagaagagcaaactgtccgagattgtgcgggaattcaaaagcaccaatcggctgctcctgactggcaccccactgcaaaacaacctgcacgaactgtgggcgctgctgaacttcttgctcccggatgtgttcaacagtgcagacgatttcgactcctggttcgataccaaaaattgcctgggcgatcagaaactggtcgaaaggctgcacgccgtgctgaaacctttcctccttagaaggattaaaactgacgtagaaaaatctctgccccctaaaaaagagatcaagatttacctggggctctccaaaatgcaacgcgagtggtataccaagatcttgatgaaagatatagacgttctcaactcttctggtaaaatggacaaaatgagactgctgaatatactcatgcagcttagaaaatgttgtaatcacccatatctgttcgatggagctgaacccgggcctccctacacaactgacgaacacatcgtgtcaaatagcggcaaaatggttgtgctggataaactgcttgctaagctgaaggagcaaggttccagagtcctgatcttcagccagatgacacggcttcttgacatcctggaagattattgcatgtggagaggctacgagtattgtcggctcgatgggcagaccccgcacgaggaaagggaggacaagtttttggaggtagagttcttggggcaacgcgaggctattgaagctttcaatgcgccaaactcaagcaaatttattttcatgctgtcaactagggccgggggcctcggcatcaacctggctagcgctgacgtggtcattctgtacgactcagactggaatccccaggttgatcttcaggccatggatcgagctcaccgaatcggacagaagaaacctgttcgggtattcaggctgataactgacaataccgtggaagagaggattgttgaaagagccgaaattaaattgagactcgacagcatcgttatacagcagggcaggctgattgaccagcagagcaacaagctggctaaggaggagatgcttcagatgattaggcatggcgctacccacgtctttgcatccaaagaatctgaattgactgacgaagacattaccaccattcttgagaggggtgagaagaagaccgctgagatgaatgagcgattgcagaaaatgggtgaatcctcattgagaaattttcgaatggatatcgagcagagtctgtataagttcgagggcgaggactatcgcgaaaagcaaaagctcggcatggtagaatggatcgagccacccaaacgggaacgcaaggctaattatgctgttgacgcatactttagggaggcccttagagtgagcgagccaaaaatccccaaggcccctcgaccacccaagcagccaaacgtgcaggatttccagttctttccacccagactgttcgaactgctggagaaggagattctttactaccggaaaacaattggctacaaggtcccccggaatcccgatatcccaaacccggctctcgcacagcgcgaagagcagaagaagatcgacggagcagagccactgacccctgaggagaccgaggaaaaggaaaaactcctgacacagggattcactaactggacaaagcgagacttcaatcaatttatcaaggcaaacgaaaagtatggtagggatgacatcgacaatatcgcccgagaagtggagggcaagtcaccagaagaagtgatggaatatagtgcagtattttgggagcggtgtaacgaactccaggacatagaaaagatcatggcccagatcgaacgaggagaagcgcgaattcaacggcggatctctatcaagaaagccctcgacgcaaagatcgcccgatataaggcaccatttcatcaactcaggatccagtacggcacatccaaaggcaagaattacaccgaagaggaggatcggtttctcatatgcatgcttcataagatggggttcgacagggagaacgtttatgaagagctgaggcagtgcgtgcggaacgcccctcagtttaggtttgactggttcatcaaaagtaggacagccatggaatttcagcgcagatgcaacacactgatttctttgatcgagaaagagaatatggaaattgaagagagggagagagctgaaaagaagaaaagagccacaaagaccccaatggtgaaatttagcgctttcagctaa

SEQ ID NO: 564 - DNA, 1050 bp, synthetic construct
  source 1..1050: mol_type = other DNA
atggcagccactgccgccgaagccgtggcctccgggagcggtgagccaagagaggaagccggtgcattgggtcccgcttgggacgaaagccagttgaggtcttattcattccctacaagacctattcccagattgtctcaatccgatccaagggcagaagagttgattgagaatgaggagccagtagtattgaccgataccaacttggtctatccggcccttaagtgggacctcgaatacctgcaggagaatattggcaacggcgactttagcgtttatagcgcttctactcacaagtttctgtactacgacgaaaaaaagatggccaacttccagaacttcaaaccaagatcaaaccgggaagagatgaagtttcacgagttcgtcgaaaagctccaggatatccagcagaggggcggagaggagaggttgtacttgcaacagactctcaacgacaccgtgggcaggaagatcgtcatggatttcctggggtttaattggaactggatcaataagcagcagggtaaacggggatgggggcagcttacctcaaatctcctcctcatcggaatggaaggcaatgtcaccccagcccactatgatgagcagcaaaattttttcgcccagattaaagggtataaaaggtgcatcctgtttcccccagatcagtttgagtgcctctacccataccctgtacaccacccttgcgaccgccagtcacaggtcgattttgacaatccggattatgagcgcttccccaactttcagaacgtcgtgggttatgaaacagtggtgggcccaggagatgtactgtacatacccatgtattggtggcatcatattgaaagtcttctgaacggagggataacaatcaccgttaatttctggtataaaggcgctccaactcccaagcgcattgaatacccactgaaggctcaccagaaggtagcgatcatgagaaacatcgaaaagatgttgggagaagccttgggcaacccacaggaggtgggcccccttttgaacactatgatcaaaggcagatataactaa

SEQ ID NO: 565 - DNA, 951 bp, synthetic construct
  source 1..951: mol_type = other DNA
atggcagaggcagcactggaagcagtgaggagcgaactgcgagagttccctgcagccgccagagagctgtgcgtgcccctggcagtgccttacttggacaagcccccgaccccccttcacttctaccgagactgggtgtgtcctaatcgaccctgtataatcagaaatgcgctccagcattggcctgccctgcagaagtggtcactcccctatttccgcgccactgtgggttccaccgaggtgagcgtcgcggtcacccctgacggctacgccgatgcggtacggggcgataggtttatgatgccagcagaacgacggcttccccttagcttcgtgctggacgtcctggagggaagggcccaacaccctggggtcctctatgtgcaaaagcagtgtagcaacttgccgtccgagctgccccagctcctgcccgatctggagagccacgtgccgtgggcttcagaagccctgggcaagatgcccgacgccgtcaatttttggttgggtgaggctgccgccgtgacgtctctccacaaggaccactacgaaaacctgtactgcgtcgtgagcggagagaaacactttctctttcaccctccttcagaccgcccatttattccttacgaactgtacacgcctgcaacctaccaacttactgaggaaggaactttcaaggttgtcgacgaggaagccatggaaaaggtgccttggatccctcttgatcccctggctccagacctcgcccgctatcctagctacagtcaggctcaggctctccggtgcactgtgagggccggtgagatgctttatcttcccgccctgtggtttcatcacgtgcaacagagccaaggctgtatcgcagtcaatttttggtacgacatggaatacgacctgaagtactcctacttccagctgttggactctctgacaaaggcatccggcctcgattaa

SEQ ID NO: 566 - DNA, 900 bp, synthetic construct
  source 1..900: mol_type = other DNA
atgcccggtcgactcctgaggggcctgtggcagagatggcgccgctacaagtacagattcgtgccgtggattgcgctcaacttgtcacacaatcccagaacactgcggtacgtccctgaggaaagcaaggataaggtaataagtgatgaggatgtgcttggaactctcctgaaggtgttccaggcactgtttttgaatgactttaataagcagagcgaaattctctctatgctgcctgagtccgtgaaatcaaagtatcaggacctgctggccgttgagcatcagggcgtgaagctcctcgagaacaggcatcagcaacaaagcacctttaaacctgaggaaatcttgtacaaaaccctggggttctcagtggcccaggcaacaagcagtctcatctctgctggcaagggtgtgtttgtgaccaaaggccttgtgccaaagggcgccgtcgtgtccatgtaccccggcaccgtttatcagaaatacgagcccattttcttccagagtatcgggaatcccttcattttcagatgcttggatggggttcttatcgacggcaacgataagggcatttccaaagtagtttatcgaagctgcaatgggagggacagacttggcccactgaagatgtcagatagcacatggcttacgtccgaaattcataatcccctggctgttggacagtatgtcaataactgtagtaatgacagagcggctaacgtgtgctaccaggaatttgatgtgccggctgtgttccccatcgagttgaaacaataccttcctaatatcgcctatagttacgacaagcagagccccctcagatgtgtggttctcgtggcgctgagagatatcaaccaaggggaagagctgtttagcaattattatacgattgtgtcctaa

SEQ ID NO: 567 - DNA, 2469 bp, synthetic construct
  source 1..2469: mol_type = other DNA
atggcgacccctcgcggcagaacaaagaagaaggcgagcttcgaccactcccctgactctctcccccttcgctccagcggccggcaggccaaaaagaaggccacagaaacaactgatgaagacgaggatggtggcagtgaaaagaagtacaggaagtgcgaaaaggcgggttgcactgccacctgtcctgtgtgcttcgcgtctgcttctgaaaggtgcgctaagaacggctacacttcacggtggtaccatttgtcttgcggtgagcatttttgtaatgagtgtttcgatcactattaccggtcacacaaggatggatatgataagtacacaacctggaaaaaaatctggacatcaaatggtaaaacggaaccaagtcccaaagcctttatggccgatcaacagctgccttattgggtgcagtgcactaaacccgaatgcagaaagtggaggcagttgacaaaggagattcagctgacaccccagatagccaagacgtacagatgtggcatgaaacctaatacagccatcaaacctgagacctcagaccactgctctctcccagaagacttgcgcgtgcttgaggtgtctaaccactggtggtattccatgttgatactgccaccactgttgaaggacagtgtggccgcccccctcctgagcgcatattaccccgattgcgttggtatgagcccctcctgcacaagtactaatagggctgctgcaacagggaatgcatctccaggcaaattggagcattcaaaagcggcactgtccgtccacgtgcctggcatgaacagatacttccagcctttttatcagcctaatgagtgcggtaaagccctgtgcgtgagaccagacgtaatggagctggacgagttgtacgaattccccgagtattctcgggaccctaccatgtacctcgccctccgaaatctgattcttgccctgtggtataccaactgtaaagaggctctgacccctcaaaaatgcattcctcacatcatagtgcgggggcttgtgaggatcagatgcgtgcaagaagtggagaggatcctgtacttcatgaccagaaagggtctgattaataccggtgtgctgtctgtgggcgcggaccagtatctgctccccaaggactatcataataaatcagtgatcatcattggggctggacctgccggactcgcagcggccaggcagctgcacaattttggaattaaggtgacagtgctggaagccaaggatagaatcggcggccgcgtgtgggatgacaaaagtttcaagggggttacagtaggacgcggtgctcaaatcgttaacgggtgcataaataaccccgtcgcgctgatgtgcgagcagttgggtatctccatgcacaagtttggggagagatgcgatctgatacaggaaggagggcggataactgaccccactattgacaagcggatggactttcatttcaatgcgttgctggatgtagtgtccgagtggcgcaaggacaaaacgcagttgcaggacgtgccactgggcgagaaaattgaggagatttataaagccttcatcaaggagtctggtattcagttcagcgagctggaggggcaggtcctccaatttcatctctctaatttggaatacgcatgtggatctaacctgcatcaggtgtctgcacgcagctgggaccataacgaatttttcgcccaatttgcaggtgaccatacactgttgactcccggctatagcgtgatcattgagaagcttgctgaaggcctcgacatccagctgaaatctcccgtgcagtgtattgactatagtggcgatgaagttcaggtcaccacgactgacggtacaggctatagcgcccagaaagtattggttacagtgcccctggccctgctgcagaagggagctattcagttcaacccccccttgtcagagaaaaagatgaaggcaatcaatagtttgggggctggcattatcgaaaagatcgcgctccaattcccctatcgcttttgggacagcaaggtccaaggtgcagatttctttggccacgttcctccgagcgctagtaagagaggtctcttcgcggttttttatgacatggacccccagaaaaaacatagtgtgctgatgagtgtgatcgctggcgaagcggtcgcctctgtgcggactcttgatgataagcaggtcctgcagcagtgcatggccaccctgagggaactttttaaggaacaggaggtccccgaccctaccaaatatttcgtcacacgctggtccaccgatccctggattcagatggcttactctttcgtaaaaactggaggctccggtgaagcatatgatattattgccgaggacattcaggggacagtgttttttgctggcgaggcaactaacagacactttccccagactgtcaccggagcctacctgagcggagtgcgagaagcctctaagatcgctgcattctaa

SEQ ID NO: 568 - DNA, 2538 bp, synthetic construct
  source 1..2538: mol_type = other DNA
atgtctaatagccgaccgagatctcggagggatgctggaggcggggccggtgctgcaggacgcgacgaacttgtgtctagaagcctccaatcagcagaacactgccttggcgttcaagatttcgggacagcctacgcccattacctgctggtcttgtctctggctcctgagctgaagcatgacgtgaaagaaacattccagtataccctgttcagatgggcggaagaattggacgcgctctcaaggatacaggatctgctgggctgctacgaacaagctctggagctgtttcctgatgatgaagtcatctgcaatagcatgggggagcaccttttcaggatgggctttcgagatgaagcagcgggatatttccacaaagcggtgaagctgaaccctgactttagcgatgccaaagagaacttctacagagtggctaattggctggtggaaaggtggcatttcatcatgctgaacgacacaaagcggaacactatctacaacgccgcgatccagaaggctgtgtgcctgggaagtaagtccgtcctcgacatcggggccggcacaggaatcctctcaatgttcgcgaaaaaggctggtgcacactccgtgtatgcttgtgaactgagcaagactatgtatgagcttgcctgcgatgtcgttgccgccaataagatggaggctggcattaagcttctgcacaccaagtccttggatatcgagatccccaagcacatccccgaacgggtttcacttgtggtcactgaaacagtagatgcaggactgtttggtgaggggattgtggaatctctgatacatgcctgggaacacttgctgctgcagcccaagaccaaaggcgagtccgctaactgcgaaaagtatgggaaggtgattccagcatccgccgtgatttttggaatggcagttgaatgtgccgagatccggcggcaccatcgggtgggtattaaggacatcgccgggattcatctgcctaccaacgttaagtttcagagccctgcctattctagcgtggacaccgaggaaactatagagccatacacgacagaaaagatgtcccgagtccctggcggctacctggccctgactgagtgctttgagatcatgaccgtcgattttaataacctccaggagctcaagtcactggcgaccaagaaacccgacaaaatcggcatccccgtgatcaaggagggcatactggacgccatcatggtgtggttcgtactccaactggacgacgaacattccttgagtacatccccctctgaagaaacatgctgggaacaagccgtgtaccctgttcaggacctggccgattattggatcaagccgggcgaccacgtgatgatggaagtttcttgccaggattgctacctcaggatacaatccatttcagtgctcgggctcgagtgcgaaatggatgtggcgaagagttttacgcagaacaaggatcttctgtcccttgggaacgaggccgagctttgcagtgcgctggcaaatctgcagactagtaagcctgatgcggttgagcaaacttgcattttggagtctacagaaatagcgctgcttaacaatattccttatcacgaggggtttaaaatggctatgtcaaaagttctctcttctctgacccccgagaaactgtaccagaccatggatactcattgtcagaacgagatgagctctggcactggacaaagcaatactgtgcagaatatattggaacccttttacgtccttgacgtgagcgaaggctttagcgtgttgcccgtgattgcaggcactttgggacaggttaagccttattcctccgttgagaaagaccaacaccggatcgccctggacttgatcagtgaagccaaccacttccccaaagagaccttggagttttggctgcggcacgtggaggacgagtcagcgatgttgcagcggccaaagtccgataagctgtggtctattatcatattggacgtgatcgaaccctccggtttgatccaacaggagatcatggagaaggcggcaatcagtcgatgcctcctccagtcaggcgggaagatctttccccagtatgtgctcatgttcggcctgcttgtagaatcccaaactcttctggaagagaatgcagttcagggcaccgagcgaactctgggcctgaacatcgccccatttatcaatcaattccaggtgcccattcgcgtatttttggacctgtccagtctgccctgcatccctttgagcaagccagtggagcttctgagattggatcttatgactccatacctgaatacatctaaccgggaggttaaggtttacgtttgtaagagcggcaggctcactgctatcccattttggtatcacatgtacctggatgaggagattcggctcgacacctcttcagaagcctcacactggaaacaggccgcagttgtcctggataatccgatccaggttgaaatgggcgaagagcttgttctgtccatacagcatcataagtcaaatgtttccataaccgtgaaacagtaa

SEQ ID NO: 569 - DNA, 2010 bp, synthetic construct
  source 1..2010: mol_type = other DNA
atgggcaccgccctggtgtatcacgaagacatgacagccaccagactgctctgggatgatcctgagtgtgagatagaaaggcctgaaaggctgacagcagctcttgatcgactgcggcagaggggtctggagcagcgctgtctgaggctgagtgctcgcgaagcaagtgaagaggaactgggactggtgcactcccctgaatacgtgtcattggtgagggagacccaggtacttggcaaagaggagttgcaggctctgtccgggcagttcgacgcgatatacttccatccttcaacattccactgcgcccgccttgccgccggcgcgggcctgcagctggtggacgcggtgcttacaggagctgtacaaaacggcttggcgttggtccggcctccgggccaccatggtcagcgcgcagccgcaaacgggttctgcgtgtttaataacgtggcaatcgccgcagcccatgctaaacagaagcacggacttcataggatcctggtggtcgactgggatgtgcatcacggccagggcatacaatatctcttcgaagatgacccttctgtgctgtatttttcatggcaccggtatgagcacggacgcttctggccctttctgcgggaatccgatgcagacgccgtgggccgcggacagggcctgggcttcacggtcaatctcccctggaatcaagtggggatggggaatgccgattatgttgctgcattcctccacttgctcctcccactggctttcgagttcgaccccgagctggtgcttgtgtctgccggattcgacagtgccattggggaccccgagggccagatgcaggctactcccgagtgcttcgcccacctcacacagctgcttcaggtgttggctggcggcagggtgtgtgctgtgctggaggggggataccacctcgagtcattggcagaaagtgtttgtatgacagtgcagacacttctcggcgatcccgccccacctttgagcggtccgatggccccatgtcagtcagcccttgaatctattcaaagcgcccgagcggcccaggcaccccattggaaaagtctgcaacagcaagacgttacagcggttcccatgagtccatcttcacacagcccagaaggtagaccgcctccccttctccccggcggacctgtctgtaaggctgctgctagcgctcctagcagtctgttggaccagccctgcctttgcccagcgccatccgttagaacggccgtagctttgacaaccccagacattaccctggtcctcccaccagacgtgatccagcaggaagcatccgcactccgcgaggaaacggaagcctgggcaagaccccatgagagcctggccagagaagaagccctgacagctctgggtaagctgctctatctcctggacggcatgctggacggccaagttaatagcggcatagctgccaccccagccagcgccgcggcagccacactggacgtagccgtccgccgagggcttagtcatggagcacagaggctgctctgtgtggccctgggtcagctcgacagaccacccgatctggcccacgatggccgctctctttggctgaacataagaggaaaagaggccgctgcacttagcatgtttcacgtgtcaacacccctgccagtgatgaccggcggcttcctgagttgcatcctgggactcgtgctcccgcttgcctacggttttcagcctgacctggtgctggtagcacttggaccaggccatggtctgcagggtccacatgccgcacttttggcagccatgctccgcggactcgcaggcggacgcgtgcttgcacttttggaagaaaatagcaccccccaactggccgggatcctggcacgcgtactcaacggcgaagctcctccctcactggggccttcttctgtcgccagccctgaggacgtacaggcactgatgtaccttagaggccagctcgagcctcagtggaaaatgctccagtgccatccccacctcgtagcataa

SEQ ID NO: 570 - DNA, 1200 bp, synthetic construct
  source 1..1200: mol_type = other DNA
atggccttctgggggtggagggccgccgccgcattgagactgtgggggcgagtggtggaaagagtggaggcaggcggcggagttggtccatttcaggcatgcgggtgccggctggttctgggcggccgggacgacgtgtcagcgggactgaggggcagccacggcgccagaggggagccattggatccggctcgccccctccagaggcccccccgccccgaagttccgagagcctttcggcggcagccacgggcagcggcccctagtttcttcttcagctcaatcaagggaggaaggaggtccatctccttttccgtgggagcctccagcgtagtcggcagtggcgggtctagtgataaaggcaagctgagcctgcaggatgtcgccgaactgatacgggctcgggcctgccagagagtagtcgttatggtgggggccgggatatccacaccctccggtattcccgactttcgctccccagggagcggcctctactctaacctccagcagtatgacctgccctatcctgaggcaatttttgagctgccctttttttttcacaacccaaagccattcttcaccctggccaaggagctctatcccggcaactacaagccaaatgtaacccattacttcctccggttgttgcacgataaaggacttctcctcagactgtacactcagaatattgacgggctggagcgggtctccgggatccctgcttccaagttggtcgaagcacatggtacgttcgcgtcagcaacctgcaccgtatgtcaaaggcccttccctggagaagacattagagcggacgtgatggccgatcgggttccgagatgtcccgtctgtacaggagttgtgaagccggatatagtgtttttcggcgaacccctgccacagaggtttctccttcacgttgtcgattttccgatggccgacctgcttctcatcttgggcacctccctggaggtggaaccatttgcctctctcaccgaggccgtcagatccagcgtgcccagactgctcatcaacagggacctggtgggtcctctggcgtggcatccaagaagtagggacgtggctcagctcggggatgtcgtgcatggagtcgagagcctggtcgaacttctggggtggaccgaagaaatgagagacctggtgcagagagagaccggcaagctggacggtcccgacaagtaa

SEQ ID NO: 571 - DNA, 2970 bp, synthetic construct
  source 1..2970: mol_type = other DNA
gccattaacgttctgatcggatccatccggattgacagcctgggcacactgagcgacctgtctgattgtgaagggcggctctttccaatcgggtatcaatgcagcaggctctactggtccacagtggacgctaggaggagatgctggtaccggtgcagaatactcgagtacagaccttggggcccaagagaagaaccagctcacctcgaagccgcagaagaaaaccagacaatcgtgcatagtccggctcccagctccgagccacccggcggcgaggaccccccgcttgataccgatgtgctcgtgcccggcgctcccgaaaggcacagccctatacagaatctcgacccaccactgcgccctgatagcgggagtgctcccccaccagcaccgcgcagcttctccggggctcgcattaaagtaccgaattactcaccttccaggaggcccctgggcggggtctcattcggccccctgcccagccccggaagccccagctcactgacgcatcatatccctaccgttggagatccagattttcccgcacctcccagaagatctagaaggccttcacctctggccccgcgccctccaccctctcggtgggcctccccccccctgaagacctcaccacagcttagagtccctcccccaactagtgtggtgaccgccttgactccaacctcaggggagctggccccaccaggcccagccccaagccctcccccacctgaggacctggggccggatttcgaggacatggaagtagtgagtggcctgagtgccgccgatttggactttgcagcatctctcctgggtacagaaccatttcaagaagaaatagttgcggcaggcgccatgggtagctcccacgggggacctggcgactcaagtgaggaagaatccagccctacctcacggtatattcactttcccgttacagttgtgtctgcacccgggctggccccaagtgccactccgggcgcccctcgcatcgaacaattggatggggtggacgacggtaccgattccgaggcagaggcggtgcagcagccccgcggccagggtacccctccctcagggcctggcgtggtgcgggccggcgtgcttggggccgcaggtgatcgggcccgaccccccgaagatcttccctccgagatcgtggatttcgtcttgaagaatcttggaggcccaggagacgggggcgccggaccacgagaagaatcacttccacctgccccacctttggctaacggctcccagccatctcagggtctgactgcctctcctgccgaccccacacgcaccttcgcttggcttcccggggccccaggggtgcgagttcttagcctcggcccagcaccagaaccaccaaagcctgccacttccaagatcatactggtgaacaagctgggtcaggtcttcgtaaagatggccggagagggcgagccagtgcccccacctgttaagcagcctccccttccacctacgatcagtcctaccgcccccacaagctggacactgcctccgggacccttgctgggggtgctgcccgtagtcggggtggtgagacctgctccccccccgcccccacctcctttgacactggtgctgtcaagtggccctgcaagccctccccgccaggccattagggttaaacgagtctctacctttagtggacgctcccctccggccccgcctccttataaggccccgagactggacgaagatggtgaggccagcgaagataccccgcaggttccgggcctcggcagcggggggttcagccgcgtgagaatgaagacaccaacagttcgcggggtgctggacttggataggcccggcgagcccgcgggcgaggagtcaccagggccgctgcaggaaagatccccacttcttcctctgcccgaggacggacctccgcaggtcccggacggccctccggatcttttgctggaaagtcagtggcaccattactccggcgaagccagctcttccgaggaggaacccccatcacccgacgacaaggagaaccaggccccaaaaagaactgggccccacttgcgatttgaaatctcttctgaggacgggttcagcgtagaggctgagagcctggaaggcgcctggagaaccctgattgagaaagtacaggaagcccgcggtcatgcgcggctgcggcatcttagtttctccgggatgagcggcgcccggctgctgggaatccatcacgacgctgtcatcttcctcgccgagcagctgcccggagcccagaggtgtcagcattataaattccgataccatcagcagggagaggggcaagaagagcctcctcttaacccccatggcgccgcccgggcagaggtgtacctgcgcaagtgtacattcgatatgttcaactttcttgccagccagcatcgggtcctccccgagggcgcaacctgcgatgaggaggaggacgaggtgcaactgagatctacacgccgcgcaacaagcctggaactccctatggctatgcgctttcgccacttgaaaaaaacgtctaaagaagctgtgggtgtatacagaagcgccattcatggccgcggtttgttctgcaaaaggaacatcgatgccggggagatggtgatcgaatattcaggaattgttattagaagtgtgcttaccgataagcgggagaaattttacgatggaaagggaatcggatgctacatgtttagaatggacgattttgatgttgtggatgcgactatgcatgggaacgctgcccggtttattaaccactcttgtgaacctaactgttttagccgcgtgattcacgtggaaggccaaaagcatattgtcatcttcgccctgaggcgcatcctgcgcggcgaggagctgacatacgactacaagttcccgattgaggatgcttctaataaactgccctgcaactgtggcgccaagcgatgtcgaagatttcttaattaa

SEQ ID NO: 572 - DNA, 1134 bp, synthetic construct
  source 1..1134: mol_type = other DNA
atggaggaacctgaagagccagcagatagtgggcagagcctggtaccggtgtatatttactcccctgagtatgtgtccatgtgtgactcccttgccaagataccaaaacgggcttctatggtgcatagcctgatcgaggcatacgctttgcacaagcaaatgcgcatagtgaagccgaaggtggcaagtatggaggagatggccacctttcacacagacgcatacttgcagcatttgcaaaaggttagccaggaaggtgacgatgatcaccctgatagcatagagtacggcctcgggtacgactgtcccgcaaccgagggaatattcgattatgcagctgctataggcggggccactatcaccgctgcccagtgcctcatcgacggcatgtgcaaggtagcgatcaactggtctggcggatggcaccacgcaaagaaggatgaggccagcggtttctgctatctgaacgacgcagttctgggtatcctgagacttcgcaggaagtttgagaggatactctatgtggacttggatctgcatcacggtgatggcgtggaggatgctttttccttcacttctaaggttatgacagtttccctgcataaattctctcccggcttcttcccaggcactggagacgtctccgacgtcggccttggaaagggtcggtattattccgtgaatgtgcctatccaggacgggatccaggacgaaaagtactaccaaatctgcgaaagcgttcttaaagaagtctatcaggccttcaaccccaaggccgttgtcctccaactcggagccgatactatcgccggagaccccatgtgttcctttaacatgactcccgtaggcattggtaaatgcctcaaatacatactgcagtggcagctggctaccctgattctgggggggggcgggtataatttggccaacaccgccagatgctggacctacctgaccggggtgatcctggggaaaactctgtctagtgaaatcccagatcatgagtttttcaccgcatacggccctgattacgtgctcgagattaccccctcttgccgccctgaccggaacgaacctcacaggatccagcagatccttaattacatcaagggcaacttgaagcacgtggtgtaa

SEQ ID NO: 573 - DNA, 1467 bp, synthetic construct
  source 1..1467: mol_type = other DNA
atggctgctgggtccgaagctactacacccgtgatagttgcagcaggagctggcggagaagagggtgagcacgtgaaaccctttaagcctgaaaaggccaaagagatcattatgagcctgcagcagccagcgatcttttgcaacatggtgttcgattggcctgctcgacactggaacgcaaaatacctgagccaagtgctccacggcaagcagattcgatttcgcatgggaatgaagtcaatgtcaacagtgccacagtttgaaaccacatgcaattacgttgaagcaacgctcgaggagtttctgacctggaattgtgaccagtctagcatctcaggccctttcagggattacgatcattctaaattttgggcatatgccgattataaatactttgtctccctgttcgaagataagacagatctgtttcaggatgttaagtggtccgatttcggcttccctggtaggaacggccaggagagtaccttgtggatcgggtctcttggcgcgcacacaccgtgccatctggattcctacggctgcaacttggtttttcaggtacagggcagaaagagatggcatctgtttccgccggaggacactccttttctgtatccgacacgcatcccgtacgaagaaagttccgtgttttccaaaattaatgtcgtcaatcccgatctcaagcggtttccccagttccgcaaagctcagcggcatgccgtaactctttctcctggacaagtgttgttcgtcccccgacactggtggcactacgtcgagtctatcgatccggtgaccgtgtccatcaatagttggatcgaactggaggaggatcacctggcccgcgttgaagaggccatcacaaggatgctggtgtgcgcacttaaaacagccgagaaccctcagaacacccgagcatggctgaatccaaccgaggtggaagaaacatcacacgcagtgaattgctgctacctgaacgctgccgtttccgctttctttgaccggtgccgcactagcgaagtggtggagattcaggcgcttcgaacagacggcgaacacatgaaaaaggaagaactgaacgtgtgcaaccatatggaggttgggcagacagggtcacagaacctcactacagggacagacaaacctgaggcagcatctcctttcggccctgacctggtgccagtcgcccagcgatcagaagagccccccagtgagcggggagggatatttggtagtgatggaaaagattttgttgacaaggacggagagcacttcgggaagctgcactgtgctaagcggcagcagattatgtccaattccgaaaacgccatagaagagcagattgcttctaataccactacaactccccagacctttatcagcactgacgacctccttgactgtctcgtgaaccctcaggtcactcggattgtagcacagttgctgatccagggccgatctctgtaa

SEQ ID NO: 574 - DNA, 1512 bp, synthetic construct
  source 1..1512: mol_type = other DNA
atgtctagccagtctcatccagacggactgagtgggagagatcagcctgtcgagcttttgaaccccgcacgggtcaaccatatgccaagcaccgttgatgtcgcaactgcactccctctgcaagtggccccaagtgctgttccaatggacctcagattggaccatcagtttagcctgccggttgcagagcctgctctgcgggagcagcagctgcagcaggagctcctcgccctcaagcagaaacagcaaattcaaagacaaatattgatcgcagagttccaacgccagcacgagcagcttagcagacagcatgaagctcagctgcacgagcatatcaagcagcagcaggagatgctggccatgaaacaccagcaggaattgctcgagcaccagaggaaacttgagcgccaccgacaggaacaagagctggaaaaacagcacagggagcagaagctgcagcagctgaaaaataaggaaaaagggaaggaatctgcagttgccagcacggaggtgaaaatgaagctgcaggagttcgtgcttaataagaaaaaggctctggctcaccggaatcttaaccattgcatatcatctgaccctcgatattggtacgggaaaacgcagcattcctcactggaccagagtagccctccccagtccggcgtatccaccagctataaccaccctgttcttggaatgtacgacgctaaggatgacttcccacttcgaaaaactgcgtctgagcccaatctcaagctgcgatctcggctgaagcagaaggtggccgagaggcgcagctctcctctcctgcgcaggaaggatggacctgtggttactgctctcaagaaaaggcctctcgatgtgactgacagcgcctgtagtagtgcaccaggctccggccctagctcaccaaacaactctagcggttccgtctccgccgagaatgggattgcccccgcagtccccagcattccagcagaaacgtccctcgcccataggcttgtcgcccgcgagggcagcgctgcgccactcccattgtacacaagcccttcattgcctaatattactctcgggctcccagccaccggtccgtcagctggcactgctggccagcaggatgccgagaggttgacactgccagcactgcaacagcggctcagcttgtttccaggtactcatctcacaccctacctttcaacgtctcccctcgagagagatggaggagccgctcattccccattgcttcaacatatggtcctgctggaacagccccctgcccaagctccactcgttactggactcggagccctgcccctgcacgcccagtccctggtcggagctgatcgagtcagccctagtattcacaagctccgccagcatcggccgctcggcaggacccagagcgccccactcccccagaatgcccaagctctgcagcacctggttattcaacagcagcatcagcagttcctggagaagcataagcagcagtttcagcaacagcagctgcagtaa

SEQ ID NO: 575 - DNA, 1746 bp, synthetic construct
  source 1..1746: mol_type = other DNA
atgaacaagattatcccgaagccgagtgagccagcccgacagcctgaaagtcacccggaagaaacggaagaggaacttcgcgaacatcaggccttgctggatgagccatacctggaccgccttcctggacagaaggaggcccacgcacaggccggtgtacaagttaaacaggagccgatagagtcagatgaggaggaggccgagcccccgagagaggttgaacccggccagcggcagccctccgagcaagaactgctgttcaggcagcaggcattgctcctggaacagcaaagaatccaccagctgcgaaattaccaggcttccatggaagccgctgggatcccagttagcttcggaggccaccgcccgctttcaagggcccaaagctctcctgcctcagctacattcccagtcagtgtgcaggagccacccaccaagcccagatttacgaccggcttggtgtatgacactctgatgctgaagcatcagtgtacttgcggtagttctagctcccaccccgaacatgctggccgaattcaaagcatttggtctaggcttcaagaaaccggactgagggggaaatgtgaatgtatccggggccgaaaggccaccctggaagagctgcagaccgttcatagcgaagcccacaccctcctgtacggtactaatccgctgaacaggcagaagctggactctaagaagttgctggggagcctggcctctgtgtttgtacggctgccttgcggcggggttggcgtggactctgacacaatctggaacgaagttcactccgctggggcggcccgacttgcagtggggtgtgttgtggagttggtttttaaggtggctacaggcgagcttaagaacggctttgccgtggtgagaccacccggccatcacgcagaagagtctacccctatggggttctgctattttaattccgtggccgttgccgccaagctgctccagcagcgcttgtctgttagtaagatcctgatcgtggactgggatgtgcaccatgggaacgggacccaacaagctttctattccgacccttccgttctgtatatgtctctgcacaggtatgatgacggcaactttttccccggcagcggcgcccctgacgaggtggggacgggacccggggtgggttttaacgtgaatatggccttcactgggggccttgacccgcccatgggagacgccgagtacctcgctgcctttaggaccgttgttatgcccattgcttcagagttcgcaccagacgtagtgcttgtaagttcagggttcgacgctgtagagggccacccaacacccctgggcggatacaacttgtccgcgagatgcttcggatacctgaccaaacagctgatgggattggcaggcggacggatcgtgcttgcactggaaggtggccatgacctgacagcaatatgtgacgctagtgaggcctgcgtgtctgctctgctgggcaacgagctggaccctttgcctgaaaaagttctgcaacagagaccaaatgccaacgctgtcagatcaatggagaaagtcatggagatccacagcaagtattggcggtgcctgcagagaacgacttccactgctggacgaagtctgatagaagcacagacgtgtgagaatgaagaagccgagactgttacagcaatggcctccctctccgtgggtgttaaaccggccgagaaacggcccgatgaagagccaatggaagaagaacccccactgtaa

SEQ ID NO: 576 - DNA, 558 bp, synthetic construct
  source 1..558: mol_type = other DNA
atggctaccgctatgtatcttgaacactacctggacagtatcgagaatttgccctgtgagttgcaacggaactttcagttgatgcgagaactggatcaaagaaccgaggacaaaaaggcagagattgacatcttggctgcagaatacatctcaaccgtgaagactctgagcccggatcaaagggtggagcggctccagaaaatccagaacgcatacagtaaatgtaaagagtatagtgacgacaaagtccagctcgccatgcagacatatgaaatggtggacaagcatattcgccgactggatgccgacttggcacgattcgaggcagatctgaaggacaaaatggagggatcagactttgagtcttcaggaggccgaggcttgaaaaaaggaaggggccagaaagagaagcgcgggagccgcggcaggggaagacgaacttctgaagaggatactcctaaaaaaaagaaacataaggggggaagtgaattcacggacaccatacttagcgtgcacccaagcgatgtgctggacatgccggtcgaccccaacgaataa

SEQ ID NO: 577 - DNA, 396 bp, synthetic construct
  source 1..396: mol_type = other DNA
atggcggatgtggtggtggggaaagataaaggaggagagcaacgcttgatttcacttccactgtcacgcatcagggtgattatgaaatcttcccccgaggtctcatctatcaatcaggaagctctggtactgaccgccaaagcaaccgaactgtttgtccaatgcttggccacatattcatatagacacggatctggaaaggagaagaaggtactcacctacagcgatcttgccaataccgcccaacagtcagagactttccagtttctggcagacatacttcccaaaaagattctggcttctaagtatctcaaaatgctgaaagaggaaaagcgcgaggaggatgaagaaaacgataatgacaatgaatccgaccatgacgaagctgacagttaa

SEQ ID NO: 578 - DNA, 1071 bp, synthetic construct
  source 1..1071: mol_type = other DNA
atgagtaaactttggaggagggggtccaccagcggggctatggaggcacccgagcccggcgaagccctggagctttcacttgcaggcgcgcacggtcacggggtgcacaagaaaaaacacaaaaagcataaaaagaagcacaagaagaagcaccatcaagaagaagacgccggacctacccaaccatctccagccaaaccacaactgaagcttaagatcaaattggggggacaagtcctcggcacgaaatccgtacctacctttacagttatcccagaggggccccggtcacccagcccacttatggtggtggacaatgaagaggagcctatggaaggagtccccctggagcaataccgcgcatggctggacgaggactccaacttgagtccttctcccttgcgagacttgagcggtgggctcggaggccaagaagaggaggaggagcagcgatggttggacgcattggagaagggcgagctggacgacaacggcgatttgaagaaagagattaacgagaggcttctgaccgccaggcagcgggcattgctccagaaggcaagaagtcagccctcaccaatgcttcccctcccagttgcagagggctgtcctcccccagccttgactgaggaaatgctcctgaagagagaggagcgcgcgcgaaagcgaaggctgcaggcagctagaagggccgaggagcataagaaccagaccattgaacggctgactaagacggcagcgacatctggaaggggcgggcggggcggagcccgcggagaacgcagaggaggtagggcagctgcccccgctcccatggtgaggtactgcagcggcgcccaggggtctactctgtctttcccccccggagttccggcacctaccgccgtgtcccagagaccttcccctagtggaccccctccccgctgctctgtaccgggctgtccccacccgaggaggtatgcctgttccagaactggtcaggctctttgctccttgcagtgttatcggatcaatctccagatgaggctggggggccccgaaggccccggtagtcccctcctcgcaacataa

SEQ ID NO: 579 - DNA, 1305 bp, synthetic construct
  source 1..1305: mol_type = other DNA
gaagaagacgatgaaaccgaagatgtgaagactgcaaccaacaatgctagctcctcctgccaatctactcccagaaagggcaaaacacacaagcacgtccacaacggacatgtcttcaatggctcttcaagatctactcgggagaaggagcccgtgcaaaagcataagtctaaggaagccactcccgccaaagagaaacacagcgatcatcgagccgactccaggagagagcaagctagcgcaaatcacccggccgctgcgccctctacagggagctcagctaaaggcctggctgcaacccatcaccaccccccacttcaccgctcagctcaagaccttagaaaacaggtgtccaaagtaaacggcgttaccagaatgtcctccctgggtgccggggtaacttcagcaaaaaagatgcgggaagtgagaccctcccctagcaaaacagtgaaatacaccgccacagtcacaaaaggggccgttacatacaccaaggcaaagagggagcttgtgaaggacaccaagcctaaccaccacaagccaagcagcgccgtcaatcacactatttcaggaaagactgagtctagcaacgccaaaaccaggaagcaggtattgtccctgggtggcgctagtaagtccaccgggcccgctgtcaacggcttgaaagttagcggaagactgaaccctaagtcctgcaccaaagaagtcggaggacggcaactgcgagagggcctccaactgcgggaaggtttgcgaaacagtaaacgcagactggaagaggcccaccaggctgaaaaacctcagagcccacccaaaaaaatgaagggagcggccggaccagccgagggtcctggtaagaaagccccagccgagcgaggtcttctcaacggccacgtgaaaaaggaggtcccggagcgatcccttgaaaggaacagacccaaacgggcgacggccggtaagagcacccctggcagacaggctcatggcaaggccgattccgcctcttgcgaaaatcgcagcacgagccagcctgaatcagtacataaaccccaggattccggcaaggcagagaaaggagggggaaaggccggctgggcggccatggacgaaattccggtgctccggcctagcgctaaagaatttcatgaccctctgatttacatcgaatcagtgagggcacaggtggaaaagtttggtatgtgcagggtaatacctccacctgactggagaccagaatgtaagcttaacgacgagatgaggttcgtgacacagatccagcatatacataaactgggaagacggtaa

SEQ ID NO: 580 - DNA, 1602 bp, synthetic construct
  source 1..1602: mol_type = other DNA
gaggaacatcgcaggttggaaaaagaagtgctgatggagaaagagatcctggagaagagaaaaggacccctggagggtcacacagagaacgaccaccacaagttccaccctttgcctagattcgagccaaagaatggtctcatacacggcgtagctccacggaatggctttagatccaagctcaaggaagtgggccaagcccagctgaaaaccggacggaggcgcctgtttgcccaggagaaagaagtggttaaggaagaggaagaagataagggcgtgttgaatgatttccataagtgtatctacaaaggtcgctccgtcagcctgacaactttttaccgcacagcgcggaatataatgtcaatgtgtttcagtaaggagcctgcgccagccgagattgaacaagagtactggcggttggtggaggagaaagactgtcacgtagctgttcattgtgggaaggtggatacaaacactcatggaagcggctttcccgtgggcaagtctgaacccttctctcggcacggatggaatctgaccgtcctcccaaataacacgggcagtatccttcggcacctcggagccgtgccgggagtgacgataccctggctgaatatagggatggtgttttctaccagttgttggagcagggatcagaaccacctcccgtacattgactaccttcacacaggggccgactgtatttggtactgcatccccgccgaagaggaaaataaactggaggatgtggttcatactctcttgcaggcaaacggcacaccaggcctgcagatgctggaatctaatgtgatgatcagtcctgaagtgctctgtaaggagggaattaaagtccataggactgtgcagcaaagcggccaatttgttgtctgctttcctggatccttcgtgtcaaaagtatgctgtggatactcagtgtcagaaacagtccattttgccacaacgcaatggacatctatgggattcgaaaccgctaaggagatgaagcgccggcacatcgcaaaacctttctcaatggaaaagttgctgtatcaaatcgcccaggcagaggccaaaaaagagaacggccccaccctgtcaaccatctccgcactgctggatgagctgagagacaccgaactccgacaaagacggcaactctttgaagctggcctgcattcttccgctcgctatggctcccatgacggttccagcactgtcgcggatggcaagaagaaacccagaaagtggttgcagctggaaacttctgagaggaggtgtcaaatctgtcagcacttgtgctatctttcaatggtggtgcaggaaaacgaaaatgtggtgttttgcctggaatgcgcacttagacacgtggaaaaacaaaaaagttgtcgcggactgaagctgatgtataggtatgacgaggaacagattatctccctcgtgaatcagatatgcggcaaagtgtccggtaagaatgggtcaatagaaaactgcctgtcaaaacctactcccaaaaggggtccaagaaaaagagccacagtcgacgtgccaccaagccgcctctctgcgtctagttcctctaagtcagcctcttcctcctcctaa

SEQ ID NO: 581 - DNA, 1302 bp, synthetic construct
  source 1..1302: mol_type = other DNA
atgagggccgaagggctggggggactggagaggttctgttcccctggcaaggggcgaggattgcgagcacttcagcctttccaggtgggagatctgctctttagctgccccgcttacgcctacgtccttacggtgaacgaaagggggaaccactgtgagtactgctttacacgaaaagaaggcctgagcaagtgcggacgctgtaaacaggcgttttactgtaacgtggaatgccaaaaggaagattggccaatgcataagttggaatgcagtccaatggttgtgtttggtgaaaactggaacccaagtgaaaccgtccggctgacggctcggatcctggccaaacagaaaattcatcctgaacggaccccttcagaaaagctccttgccgttaaggaattcgaatcccacctggacaagctcgataacgagaagaaggatctcattcaatctgatattgcagccttgcaccatttctacagcaaacacctggggttcccagataacgatagcttggtggtgttgtttgcccaggtgaactgtaacggcttcacaatagaagatgaggaactcagtcacctcggttctgcgattttccccgacgttgccctgatgaatcatagctgttgccccaacgttattgtgacctacaaaggaaccttggccgaagtgagagccgttcaggagattaagccaggggaggaagtgtttacctcctacattgatctgctttatccgaccgaagatcgaaacgatagacttagagattcttacttctttacatgtgaatgtcaagagtgcactactaaagacaaggacaaggccaaggtcgaaatccggaaactgtctgatcctccgaaagccgaggcaataagggatatggtcaggtatgcccggaacgtaattgaggagttccgaagggctaaacactacaagtcaccaagtgagctgctggagatctgcgagcttagccaggagaagatgtccagcgtttttgaggactccaacgtttatatgctccacatgatgtaccaagcgatgggagtctgtctgtacatgcaggactgggagggtgctctgcagtacgggcagaaaatcatcaagccatatagtaagcattatcccctctacagcctgaacgtggccagcatgtggttgaaattgggacgcctttacatgggactcgaacacaaggcggcaggagagaaagcccttaagaaagcaattgccatcatggaggtagctcatggtaaggaccacccctatattagcgaaattaagcaggaaattgagagtcattaa

SEQ ID NO: 582 - DNA, 735 bp, synthetic construct
  source 1..735: mol_type = other DNA
atgaatgggcccgccgatggagaggttgactataagaagaaatatcgcaaccttaaaagaaagttgaagtttctgatctatgaacacgaatgttttcaggaggaactcaggaaagctcagagaaagctgctcaaagtcagtcgcgataaatccttcctgctggaccgactcctgcagtatgagaacgtggatgaggacagcagcgactctgacgcgacagccagctctgacaacagcgaaaccgaaggcacgccaaaactgtccgacactccggctcccaagaggaagcgatctccccctctcggaggcgccccctcacctagctctttgtctctcccccctagcaccggcttccccctgcaggccagcggggtaccaagcccttatttgtctagtcttgctagttccagataccccccgtttcctagcgattatttggctctgcagctgccagagcccagcccactgagaccgaagagggaaaaacggccacgcttgccgcgcaaactgaagatggcggttggccctcccgactgcccggtcggaggtcccctcactttccccgggcgcgggtccggtgctggggtgggcacgacactcactccccttccacctcccaaaatgccccccccaactatactgagcacagtgccacggcagatgtttagtgatgccggctctggtgatgacgccctcgatggagacgacgacctggtgatcgacatccctgaataa

SEQ ID NO: 583 - DNA, 2871 bp, synthetic construct
  source 1..2871: mol_type = other DNA
atggaagccggcgggttgcctcttgagctgtggaggatgatcctcgcctacttgcatcttccggacttgggtagatgttccctggtgtgtagagcgtggtacgagttgatcctctccctcgactcaacgcgctggcgccagctgtgtcttggttgcacggagtgccgacatccaaactggccgaaccagccagacgtggaacccgagtcctggcgcgaggctttcaaacagcattatctggcctccaagacctggaccaagaatgccctcgacctggaaagttccatttgcttctccctctttcggcgacgccgggagagaaggactcttagtgtggggccagggcgcgaattcgactctctggggtctgccctggccatggctagcttgtacgaccgaatcgtgcttttccctggggtttacgaggagcagggagagataattctgaaagtacctgtggaaatagtcggacagggcaaacttggggaggtcgccctgctcgcttctatcgatcagcactgtagcacaactcgcctgtgtaacttggtctttacgcctgcatggtttagcccaatcatgtacaaaaccacctctgggcatgtacaattcgacaactgcaattttgagaacggccacatccaagtgcatggacctgggacgtgccaggtgaagttctgcacttttaaaaacacacatattttcctgcataatgtgccactgtgtgtgctcgagaactgcgaattcgtggggtcagaaaataactctgtcaccgtggagggccaccctagcgctgacaaaaactgggcctacaagtatctcctgggtttgattaagagcagcccaacattcctccccacagaagactccgattttctcatgagtctggacttggagagcagggaccaagcatggagtcccaaaacctgtgatattgtcatcgaaggtagccagagccctacctctcccgcatcaagctctccaaagccagggtctaaggcaggctcacaagaggcggaggtcggatccgacggagagcgggtggcccagacacctgactcatccgacggcgggcttagtcctagtggagaagatgaggacgaggatcagctcatgtataggctgtcataccaggtccagggacctaggcccgtactgggcggatctttcctggggccaccgttgcccggagcgtcaatacaactcccgtcctgtctcgtccttaatagcttgcagcaggaactgcagaaggataaagaggctatggctttggcgaactctgttcaaggatgtctgattaggaaatgcctgttccgggacggtaaaggcggggttttcgtgtgcagccacgggagggcaaagatggagggtaatatctttcgcaacctgacttacgccgtccggtgcatacacaacagtaaaattattatgctcagaaatgatatctacagatgcagagcctcaggtatcttcctccggttggaaggtgggggccttatcgccggcaataacatttaccacaacgccgaggcgggggtcgatatccggaaaaaatccaatcccctgatactctgtaatcaaattcatcacggtcttaggtccgggatcgtggttctgggtaacggaaagggcatcataagaaacaaccagattttttccaacaaagaggcaggcatttacatcctttaccacggcaatcctgtcgtgagtggaaatcatatatttaaggggagagcagcaggcatcgccgtgaatgagaatggtaagggactcattactgaaaacgttatccgcgaaaatcagtgggggggcgtggatatacgcagaggaggtatccctgttctgagaagcaacctgatatgtttcggctattccgatggtgtcgtggttggcgatgaggggaaggggctcatcgaggggaacaccatatacgccaataaaggctgcggggtctggatgatgtctagctctctccctcatgtgacaagcaatcacgtttcctataacggcctgtacggtgtggctgtgtttagtcagaaagacggatcaagcgagctgcccagggggcaccgcgcccaagaaaatttttcagaggatggcgacgcaattctctgggagactgaactggaaaaggaagacgacccgcttcggcgacccattactatcgcccttgtggagagcaactcaatcaaccataatggggctagcgggctgtatgtgcaatcttccgaggccctgcatgtgattactaacgtaatccacgctaacggcgataggggaatcactgtggcacagtcttctcagcccaccagagtggccaataactcaatttcatgtaatcggcaaagcggagtcaaagtagaggctcagtgcaaggtggagcttagagggaacggcatctacgataacagaggccacgggattataacaaagggcgattccaccattgtgatcgagaatgacattattggcaacagagggagtggcctgcaactcttgccgcgctcagacacgaaggtgataaagaataggatccacagcttccgagcctatggtattgcagtgcggggccgagccaaagccctggtgcaggaaaacatcatattccaagggaaaactagcaagaccatctttcaacagatctcaaacaatagagagtgcattatgcagaacaataaattcctcgttttcaagaagaaaagcgatacatggagactggtcaatcctcctgctcggccccaccttgaaaatagcttgaggcgcccttctgctgctcataatgggcagaaggttacagcgatggcaacacgaattaccgcacgggtggaaggcgggtatcacagcaatcggtcagttttctgtacaattttgtaa

SEQ ID NO: 584 - DNA, 2043 bp, synthetic construct
  source 1..2043: mol_type = other DNA
ccactgaacccaagctgtaaaataatgaccttccgaccctctatggaggaatttcgcgaatttaacaaatatctggcatacatggagtcaaagggagctcatagagctgggcttgctaaggtgataccccctaaggagtggaaaccccggcagtgttacgatgacatcgataacctcctcatccccgcaccaatccagcaaatggtgaccggccaaagcggcctctttactcagtacaacatacagaaaaaggccatgactgtaaaagagttccggcagctggctaacagcggcaagtactgcaccccccgctacttggattacgaggacctcgaacgcaagtattggaagaatctcacctttgtcgcacctatctacggggctgatataaacggctccatctacgacgaaggcgtcgacgagtggaacatagccagactcaataccgtcctggacgtggtcgaagaagaatgcgggatatccatcgagggggtgaatacaccgtatctctattttggcatgtggaaaacaacattcgcctggcacacagaagatatggatttgtatagcataaattatcttcactttggcgagccaaaatcttggtatgcaattccgccagagcatggtaagcgcctggagaggctggcccaggggttcttcccgagcagctctcaggggtgcgatgcttttctcaggcataagatgacactcatctccccgagcgtactcaagaagtacggcattccattcgataagattacgcaggaagctggggagtttatgattaccttcccctatggttatcatgctgggtttaatcacggctttaactgtgcggaatctacgaattttgcaacagtgcggtggatagattacggcaaagtcgctaaactctgtacatgtcggaaagatatggtgaaaataagcatggacatcttcgtacggaagttccagccagataggtaccagctgtggaagcagggcaaagacatttataccatagaccatacgaaaccaaccccggctagcacgcctgaagtgaaagcttggctgcagaggaggaggaaagtaagaaaagcaagtaggtcattccaatgcgctagatctacgtcaaaaagacccaaggctgacgaggaggaggaagtctccgatgaagtggacggagccgaagtccccaaccccgattccgttacagacgacttgaaggtctccgaaaagtccgaagctgctgtgaagttgagaaataccgaagcttcctccgaagaagagagttcagcgagccgcatgcaggttgagcagaacctgtctgatcacattaaactctctgggaattcctgccttagtaccagcgtcacagaggacatcaagacagaagatgataaggcctatgcttacaggagcgtgccaagtatcagttccgaggctgacgatagcatcccactgagctccggctacgagaagcccgaaaaaagtgacccatctgagctgtcttggccaaagtccccggaatcctgttcttccgttgcagagtctaatggagttcttaccgagggggaagagagcgatgtagagagtcacggaaacggactggagcccggtgaaattcctgcagttccgagtggtgagagaaacagctttaaagtgccttctattgccgagggagaaaataaaacgagcaaatcctggagacatccacttagtcgccctcccgcacgctcccctatgactctggtaaagcaacaggccccctcagacgaagaattgcctgaagtgctgtccattgaagaagaggtggaggagacagaatcttgggctaaaccccttatccatctgtggcagactaagtcccccaattttgccgctgaacaggaatacaatgcaaccgtggccaggatgaaaccgcactgtgcaatctgcaccctgctcatgccctaccacaaacccgacagcagcaatgaggaaaatgatgctagatgggaaacaaagttggatgaagtcgtgacctccgaaggcaaaaccaagcccttgattccagagtaa

SEQ ID NO: 585 - DNA, 2001 bp, synthetic construct
  source 1..2001: mol_type = other DNA
attgaaagcgatagtgagagcgatggggaactgcaagataggaaaaaggtgcgggtcgaggtggaacaaggggagaccagcgtcccaccaggaagtgccctggtggggccctcctgtgtgatggatgactttcgcgaccctcaaagatggaaggaatgcgctaagcagggcaaaatgccctgttacttcgatcttatcgaggagaacgtgtaccttaccgaacggaaaaagaacaagtctcaccgcgacatcaaaaggatgcaatgcgaatgcaccccacttagtaaggatgagagggcacaaggggagattgcttgtggagaagattgccttaatcgcctgctgatgattgagtgctctagccgctgccctaacggcgactattgcagcaacaggcgcttccaacggaaacagcacgctgacgtggaggtgattctgacggaaaaaaaaggatggggcctgcgcgctgcgaaagaccttccttctaacacttttgttttggagtactgtggagaggtcctggaccacaaggaatttaaggcacgggttaaagagtatgcccgaaacaaaaatattcactattactttatggccctgaagaacgacgaaataattgacgccactcagaagggtaattgttccaggttcatgaaccatagctgcgagcccaactgcgaaacccagaagtggaccgtgaacggacagctgcgggttggctttttcacaacaaaattggttccaagcggatccgaactgacattcgactatcaattccaacgctatggaaaagaagcacagaaatgtttctgcgggagtgctaattgtagggggtacctcggcggggaaaaccgagtctccattcgcgccgcaggcggaaagatgaaaaaagaacgatccagaaagaaggattcagtggatggcgaattggaggccttgatggagaacggtgagggcttgagtgataaaaatcaagtcctgagcctgtccagactcatggtgagaattgagactctggagcagaagctcacttgcttggaactcatccagaacactcacagccagtcctgcttgaaaagcttcctcgaacgccacggactgagtttgttgtggatctggatggctgaattgggcgatggcagggagtccaatcaaaagctccaggaagagatcattaagaccctcgaacacctgcccatcccgactaagaatatgctggaggagtcaaaagtgctgccaattatccaacgatggtctcaaacaaagaccgcagtcccccccctgagtgagggtgatggctactctagtgaaaacacttcaagagcacataccccccttaatacacctgacccgagcactaaactttccacagaggccgatactgacacgccaaaaaagctcatgtttagacgcctgaaaattatttctgaaaactcaatggacagcgctatcagcgatgccacctccgagctggagggcaaagacggcaaggaagacctggaccaactggaaaacgtcccagttgaagaagaagaagagctccaatcccagcaactgctccctcaacagttgccggagtgtaaggtagacagcgagactaatatagaggcgtcaaagttgccaacttccgagccagaggcagatgcagagatcgagccaaaagagtcaaatggaaccaaattggaggaaccaatcaacgaagagactccttcacaggatgaggaagagggagtctccgacgttgagtctgagcggtctcaagaacagcctgacaagacagtggatatttcagatctggcaacaaagctgctggacagttggaaagatctgaaggaggtgtatcgcatccccaagaaaagccaaacggaaaaagaaaacacaacaaccgagagaggacgagacgcagtgggcttcagagaccaaactccagcgcccaaaaccccaaatagaagcagagaaagagacccagataagcaaactcagaacaaagagaaaagaaagtaa

SEQ ID NO: 586 - DNA, 1467 bp, synthetic construct
  source 1..1467: mol_type = other DNA
cggagatcttcactttcccctccatcaagtgcttacgagcgaggaaccaagagaccagacgacagatatgatactcccacctctaagaagaaagtgcgaattaaagaccggaataagctgagtaccgaggagaggaggaaactctttgaacaagaagtggcccagagagaggcccagaagcaacagcagcagatgcagaatctcgggatgacttcccccttgccatatgattcactcggatataacgccccccaccacccctttgctgggtatcctccaggatatccaatgcaagcatacgtggacccttccaaccccaatgccggcaaagtactgctgcccactccttcaatggaccccgtttgctctccagcgccttatgatcacgcccagcctcttgtgggacactccacggaacccctgagcgcccctccgcccgttcccgtcgtgccacacgttgctgcacctgtcgaggtctcaagctcacagtacgtcgcacaatctgacggcgtggtccatcaggactcaagcgttgccgtgcttccggtgccggcacctggcccagttcagggtcagaactatagcgtgtgggattcaaatcagcaatctgtctcagtccagcagcagtatagtccggctcaatcacaggctaccatctattatcagggacagacatgccccacagtatacggtgtcacatcaccgtattcccagacaacacctcccatcgtccagtcctatgcccagccaagtctgcagtacatacagggtcaacagatctttaccgcccatcctcagggcgtcgtcgtccagcccgccgcagccgtgactaccatcgtggcccccgggcagcctcagcccttgcagccatcagaaatggtggtgacaaataatcttctggacctgccaccacccagcccacctaagccaaaaacgattgtcctcccacccaactggaaaaccgcccgcgaccctgagggtaagatatactattaccatgtgatcactaggcaaacccagtgggatccccccacatgggaaagcccaggggatgacgcatccctcgagcacgaggcagagatggacctggggaccccgacctacgacgaaaaccccatgaaggcctctaaaaagcctaaaacagcggaagctgacaccagcagcgaactggccaaaaagtctaaagaggtgttcagaaaagaaatgtcacagttcatcgtgcaatgcctgaacccttatcgaaaaccggattgcaaggttggccgcattacaacaactgaagactttaaacacctggcacgcaaactgacccacggtgtgatgaacaaagagctcaagtactgcaaaaatccagaggacctggaatgcaatgagaatgtgaagcataagaccaaagagtatatcaagaaatatatgcagaagtttggcgccgtttacaagcctaaggaggacaccgagctggaataa

SEQ ID NO: 587 - DNA, 2244 bp, synthetic construct
  source 1..2244: mol_type = other DNA
atggctgacgaggccgcactcgccctccagccaggagggagcccatctgcagcaggtgcagaccgcgaggctgcatctagccccgcgggcgaaccgttgaggaagaggccgagacgcgacggccccgggttggaacggtcccccggggaacctggcggcgccgcccctgagcgggaagtgcccgcagcagctaggggctgccctggagccgccgcagcagcgctgtggagagaagccgaggcagaagcagcggccgctggaggcgaacaggaagcgcaggcaaccgctgcggcaggcgaaggggacaacggcccgggattgcaagggccttcccgagagcctccccttgccgataacctgtacgacgaggacgatgacgacgagggagaggaagaggaagaggccgctgccgctgccataggctaccgcgacaacctgcttttcggggacgagataattacgaacggatttcattcttgtgaatctgatgaggaggatcgggcttctcatgcgtcttcctctgactggaccccaaggccaaggatcggtccatataccttcgtgcaacagcatcttatgattggcaccgatcccaggaccatcctgaaggatttgctgccagaaactatcccccctccggagctcgatgacatgaccctgtggcagattgtgattaacatccttagtgaaccacctaagaggaagaagcggaaagatattaatacaatcgaggacgctgtcaaattgcttcaggaatgcaaaaaaataatcgtcctgactggcgctggcgtctctgtcagctgtggaatacctgacttcagaagcagggacggtatttacgcgaggctggccgttgatttcccagacctgccagaccctcaagcgatgttcgatatcgaatacttcagaaaggatccaagaccgttctttaagttcgctaaggagatttatccaggacagtttcaacccagcctgtgtcacaagttcatcgccctgagcgataaggaaggcaagttgctgcgcaattatacccagaacatcgatacacttgaacaggtggcagggattcaaagaattatccagtgtcatggctcattcgctaccgcaagctgtttgatctgtaaatacaaagtagattgtgaggctgtgaggggagacatatttaatcaggtcgtgcccagatgtcctaggtgccccgcggacgaacccttggctataatgaagccggaaattgtgttttttggtgagaatctgcctgagcagttccatcgagccatgaaatacgataaggatgaagtggatttgttgattgtgatcgggtccagcctcaaagttaggccggttgccctgatcccatctagcatcccccatgaagtgccccagatcttgataaaccgagagccgctcccccacctccacttcgacgtagaacttctcggggactgtgacgtcatcatcaacgagctttgccacaggctgggaggagagtacgcaaagctgtgttgcaacccggtcaagctctctgagattacagagaagccccccaggacgcagaaggagcttgcatatctgagcgaattgccacccaccccgctgcacgtgtccgaggactcctcaagtcccgaacggaccagcccccccgattcctctgtgattgtgaccctgctggaccaggccgcaaagagcaatgacgacttggacgtgtcagagtctaaaggatgcatggaagaaaagcctcaggaagttcagacatcacgcaacgtggagtccattgccgagcagatggaaaatccggatttgaagaacgtgggaagcagtacaggcgagaagaatgaaaggacaagcgtcgctggaactgtgaggaaatgttggcccaaccgcgtggcaaaggagcaaatttcaaggaggttggatggcaatcaatacttgtttctgccaccaaatcggtacatattccatggcgctgaggtctattccgattccgaggatgatgttctgtctagtagcagctgcggctctaattcagacagcggaacgtgccagtctcccagtctggaggagcccatggaagacgagagcgaaatcgaagagttctataacggcttggaagatgaaccagacgtgcctgaacgcgccggaggcgctgggttcgggacagatggtgacgatcaagaagccatcaacgaggcgatctctgtaaaacaagaagtgactgacatgaactatcccagtaacaagagctaa

SEQ ID NO: 588 - DNA, 2754 bp, synthetic construct
  source 1..2754: mol_type = other DNA
atggaccttcgcgtggggcaacgaccccccgtagaaccgccgccagaaccaaccctgctggctcttcagcgacctcaacgactccaccaccatctgtttctggccggtctccagcagcaacggtccgtggaacctatgcgcctgagcatggacactcccatgccggagctccaagtgggccctcaggaacaggagttgcggcagttgctccacaaagataagtctaagagatctgctgttgcttctagcgtggtcaagcagaagttggctgaggtgattctgaaaaagcaacaggccgcccttgagcggaccgttcatccaaattctcccgggattccttaccgcaccctggagcctttggaaacagagggtgccaccaggtccatgctcagcagctttttgccgccagttccttcactcccaagcgaccctcccgaacatttccccctgaggaagaccgtgtccgaacccaatttgaagctgagatacaagcccaagaaaagcctggaacgccgaaagaatccactgcttagaaaagagtctgctccaccttcattgagacgccgcccggcagaaactctgggagatagcagcccctcctctagcagtacccctgcctccggttgttcaagtcccaacgatagtgaacacggtcccaaccctattctgggctccgaggctttgcttggacaacggctcaggcttcaagagacctccgtcgcccccttcgcacttccgacagtgtccctgttgcccgctattacactcggcctccccgctcctgccagagccgacagtgatagacgcacccatcctactctgggcccccgcggccccatactggggagccctcatacccccctctttctgccccacggcctggagcccgaggccggcggtacattgcccagccgccttcaaccaatcttgctcctggacccctcaggcagtcacgctcccctgcttactgtcccaggtctcgggccactgccttttcacttcgcgcagagcttgatgacaacagaacgactcagtggtagcgggctgcactggccactcagtagaacccggagtgaacctttgcctccatctgctacagcaccccctcctccggggccaatgcagcctagactggagcagctgaagactcatgtgcaggtgataaagaggtccgccaagccgagtgagaagccacggttgaggcaaatcccatcagctgaagaccttgagacagatggcggcggtcctggacaagtagtggacgatgggctggagcaccgagagctgggacacggacagccagaggcccggggtcccgctccactccagcagcatcctcaggttcttctgtgggagcagcagagactggcgggtaggttgccccggggtagtaccggcgataccgtgttgctgcccttggcccagggcggccacaggccattgagtcgcgctcagagctctcctgctgccccggcgtccttgtccgcccctgagcccgcctcacaggctagggttctgtccagcagcgagacccctgccaggacgttgccctttacgacaggccttatatatgattcagtgatgctgaaacaccagtgttcctgcggcgataattctcgacatccagagcacgccggacggattcagtccatctggtcccgactgcaagagcggggactccgatcccaatgtgagtgtttgaggggacgaaaggcgagcctggaagagctgcagagcgtgcacagtgagagacacgttcttctttacgggaccaaccctctgtctcggttgaaactggacaatggcaaattggctggtctcctcgcacagcgcatgttcgtcatgctgccgtgtggtggcgtgggggtggacacggatacaatctggaacgagttgcacagcagcaacgcggcaaggtgggccgccggttctgtgaccgacctcgcgtttaaagtggcctctcgcgagctgaagaatggctttgcggtggtgagaccccctgggcatcatgccgatcatagcacggcaatggggttttgctttttcaattccgtcgccatagcatgccggcagctgcagcaacagtcaaaggcaagcaagatcctgattgtcgattgggacgttcaccacggaaacgggacgcagcagaccttttaccaagatccgtctgtgttgtatatcagcttgcatagacacgacgacgggaacttttttcccgggtcaggtgccgtcgacgaagttggcgccggtagtggagaaggatttaatgtaaacgtcgcttgggccggaggcctggacccccctatgggggatccagagtatcttgcggcttttagaattgtagtcatgcctatagccagagagttctctccggatctcgtgcttgtgtctgccggctttgacgcagccgaaggtcaccccgctccactgggcggctaccacgtgtccgccaaatgtttcgggtacatgacccagcagctgatgaatcttgcgggtggcgcagtggtcctggccctggagggcggacatgacctgacagccatctgcgatgctagcgaggcatgtgtagcagcactgctcgggaaccgggtggacccactgagcgaagaaggttggaaacagaaaccgaacctcaacgcgataaggtctttggaggccgtcatcagagtgcattcaaagtactggggctgtatgcagcgacttgcctcatgcccagactcatgggttccccgagttcctggagctgataagtaa

SEQ ID NO: 589 - DNA, 1110 bp, synthetic construct
  source 1..1110: mol_type = other DNA
atggactcccttgaccacatgcttaccgacccgctggagctgggaccttgtggggacggacacggtacgagaatcatggaggactgtcttctgggtggcactcgagtctctctgcctgaagacctgctggaggaccctgaaatctttttcgacgtggtcagcttgtccacgtggcaggaggtgctttctgactcacaacgcgaacatcttcaacagtttcttccacagttccctgaggattctgctgagcaacagaatgaactgattctggcgttgttttctggcgaaaactttagattcgggaaccctctgcacattgcacaaaaactctttcgggacggccactttaacccagaggtggttaagtatagacaactgtgcttcaaatcccagtacaagaggtatttgaatagccaacagcagtacttccaccggctgctgaaacagatccttgcttcccggagcgatctcctggaaatggctcggagatccggccctgccctgcccttccggcagaaacggcccagcccaagtcgaacccccgaggagcgggagtggagaacacaacagcggtacctcaaagtcctgcgggaagtaaaggaggagtgcggggataccgccctcagctctgacgaggaggatctgtctagctggttgccttcatctccggcccgaagcccctcccccgccgtgcctcttcgagtggtcccaacactgtccacgactgacatgaaaactgcggataaagtggaactgggagacagcgacctgaaaataatgctgaagaaacatcacgaaaaacgcaagcaccagcctgaccacccagacttgttgactggagatttgactctgaatgatattatgaccagagtgaacgctggaagaaagggctctttggccgcgctctatgatttggcggtgctgaagaaaaaagtgaaggagaaagaagagaagaagaaaaagaaaataaagaccattaagagcgaggccgaggatctggcagagccattgtcaagcactgagggtgtggcccccctgtctcaggctccttccccgctggcaatccctgcaatcaaagaagaacctttggaggatctgaagccctgctaa

SEQ ID NO: 590 - DNA, 2415 bp, synthetic construct
  source 1..2415: mol_type = other DNA
gacgcaacaacgcccgttcctcgcgtgaggaccgactacgttgtgcggccttccacgggcgaagagaaacgggtgttccaagagcaggagagatacaggtactctcaaccccataaggcatttacgtttaggatgcatggcttcgagagcgtggtaggccccgtgaagggggtgtttgacaaagaaacttcactcaacaaagcgcgagagcacagcttgctcagatccgaccggcccgcttatgtaacgatcctgtctcttgtcagagatgccgcggcccggctccccaacggcgaaggcacgcgcgccgagatatgtgaactgttgaaggactcccagtttctggccccagacgttactagcacacaggtcaatacagtggttagcggagcattggaccgcctgcactacgagaaggatccatgtgtaaaatatgacattggacgaaagttgtggatctacttgcatcgcgatcggtcagaagaagagtttgaacgcatccaccaagcccaagccgccgccgccaaggcccgcaaggctcttcagcagaaacctaagccaccctcaaaagtgaagtcctcctcaaaggagagcagtattaaagtgctttcatccggtccctccgaacaaagtcaaatgagtcttagtgattcctccatgccccccacacccgtcacacctgtgactcctactacccccgcccttcctgcaatccctatcagccctccacccgtgagtgcagtgaacaaatccggccccagcaccgttagtgaaccagcaaaatcatctagcggggtgctgctcgtctcatcaccaacgatgccccatcttggcaccatgctcagcccggcttcctctcaaactgccccaagcagccaggccgccgctagggttgtatcacattctggaagcgctggcctgtcccaggtgcgagtcgtggcgcagccatctctgcccgccgtgccacagcaatccggggggccggctcagaccctgccgcagatgcctgcagggccccagatcagggttcctgctaccgccactcagaccaaagttgtcccccagacagttatggccaccgtgccagtcaaggcacaaacaactgccgcgaccgtgcagaggccgggtcccgggcagacagggctcacagtgaccagcttgcctgctacagccagtcctgtgtcaaaacccgcgactagcagtccagggactagtgccccctcagcgagcactgcagccgtcatccaaaacgtgactggacaaaacatcatcaaacaggttgctatcactggacagcttggagtgaagccacaaaccggtaacagcattcctctgacagctaccaattttcggattcaaggaaaggacgtcttgcgactccctccatcaagcattacgaccgacgccaaaggccagactgtcctcagaattacaccagatatgatggccacactggcaaagagccaagtgaccacggtgaagctgactcaggacctgtttggaaccggaggcaataccacaggcaaggggattagcgccactttgcacgttaccagcaaccctgtgcacgctgccgattctcccgccaaagcctctagtgccagcgcgcctagttcaacacctactgggacaactgtggttaaagtgaccccagatcttaagcccaccgaagccagcagttcagcctttcggctcatgccagcccttggagtcagtgttgccgaccagaaaggcaagtctactgtcgcatcctccgaggccaaaccagctgccacaattcggatcgtgcaggggctgggcgtgatgccccccaaagctggacagaccatcactgtggctacacatgcaaaacaaggcgcatccgtggcgtcaggttctggcacggtgcacactagcgcagtcagtctgcccagcatgaacgccgcagttagcaagacggttgccgtggcttccggagctgcgagtactccgatcagcattagcactggagcgcccacagtccgccaggttccggtctcaactaccgtcgtgtccaccagccaggctggaaaattgcctactaggatcaccgttcccctgtcagtaatcagccagccaatgaaaggaaagtccgttgtgacggctcctatcatcaagggcaatcttggcgccaacctgagtggactgggccgaaatatcatcctcaccaccatgcctgccggtactaaattgatcgccggaaataaacctgtgagttttctgactgctcagcagctccagcaactgcagcagcagggccaggccacacaggtgaggattcagacagtccccgcgtcacacttgcagcaaggcacggcctctggctcttccaaagcagtgagtaccgttgttgttacaaccgctccgtcaccaaagcaagcccccgagcaacagtaa

SEQ ID NO: 591 - DNA, 999 bp, synthetic construct
  source 1..999: mol_type = other DNA
gagtgctctaagcctcaagaggccttcggttttgagcaggccgccagggactataccctgcggactttcggcgagatggccgacgctttcaaatctgactacttcaacatgcctgtgcacatggtgcccacagaacttgtggagaaggagttctggaggcttgtgtccacaatcgaagaggacgtcacagtggaatatggagcagacatagccagtaaagagtttggctctgggttccctgttcgggacgggaagatcaaactgtctcctgaagaagaggagtacctcgattccggatggaatcttaacaacatgccagtgatggaacagtctgtgctggcgcacattacagcagatatttgcggaatgaagctcccgtggctttatgttggtatgtgcttcagtagtttctgctggcatatcgaagatcactggtcttattccattaattacctgcattggggcgaacccaagacatggtatggagtgcctgggtatgccgcggaacagttggagaatgtgatgaagaaactggcccccgagctctttgtatcccagccggacctcctgcatcagctggtcacaattatgaatccgaataccctgatgacacatgaagtgcctgtttataggacaaatcaatgcgctggcgagttcgtcatcacctttcctcgagcttaccacagcggatttaatcagggcttcaactttgctgaagccgttaacttctgcaccgtcgactggcttccactgggaagacagtgtgtggaacattaccgcctgctccatcggtactgcgtgttctcacatgacgagatgatttgcaagatggctagcaaggcggacgttcttgatgttgtggtggccagcaccgtgcagaaagatatggcaatcatgatcgaggacgaaaaggcccttcgcgaaaccgttaggaaattgggtgtaatcgactcagagcgcatggatttcgagctgctgccggatgacgagaggcaataa

SEQ ID NO: 592 - DNA, 3036 bp, synthetic construct
  source 1..3036: mol_type = other DNA
atgcactcaatgatttcaagcgttgacgtgaaatccgaggtgccagtcggtctcgaaccaatttctccactcgatctgcgcaccgatttgcgcatgatgatgcctgtagtcgacccggtcgtgcgcgagaagcagctgcagcaagagttgctgcttatccagcagcagcagcagattcagaagcagctgctcatcgctgagttccagaagcaacatgaaaatctgacgcgacagcatcaggcccagcttcaggagcacatcaaggagctgcttgctattaaacagcagcaggagctcttggaaaaagagcagaaacttgaacagcaacggcaggagcaggaagtcgaaagacacagacgggaacagcagcttccacccctgaggggcaaggacagggggagagagagagccgtggcaagcacagaagttaagcagaagttgcaggagttcctgctgtctaaatctgctactaaagatacgccaactaacggaaaaaaccacagcgtctcaaggcaccctaagctctggtatacagccgctcaccacacctcattggaccagtcatcccccccgctgtcaggcacttccccaagttacaaatacacactcccaggggcccaagacgcaaaggacgatttccctttgaggaagaccgcaagtgaacctaatctgaaagtgcgctctcgacttaagcaaaaggtggctgaacggcgatcttccccgttgttgcggcgcaaagacggaaacgtggttacatcatttaaaaaaaggatgtttgaagtgaccgaatctagcgtgtccagttccagccccggttcaggacctagctcaccaaacaacgggccgaccggctctgtgaccgagaacgagacctctgtgttgcccccaacaccacacgctgagcagatggtcagccagcagaggatcctcatccacgaggatagtatgaatctgttgtctctgtataccagcccctcactgcccaacattactctgggtctgcccgctgtgccttctcagctgaacgcctctaactctctgaaagagaaacagaaatgcgagactcagacacttcggcagggagttcccttgccaggtcaatatggcggatccataccagccagctcctctcacccccacgtcaccttggaaggtaagccccccaacagcagtcaccaggccctgctccagcatctgttgctgaaggagcaaatgaggcagcagaaactgcttgtagctggaggggtcccactccatcctcagagccctctggctactaaagaaagaatatcccccgggatcaggggcactcacaaactgccacggcatcgccctctgaatagaacccaatcagcaccactcccacagagcacactcgcgcagctggtgattcagcaacagcatcaacagttcttggagaagcaaaagcagtatcagcagcagattcatatgaacaaactgctctccaagtctattgaacagcttaagcaacccggtagccatttggaggaagctgaggaggaactgcaaggagaccaggcgatgcaagaggaccgggcccccagtagcgggaatagcaccaggtccgatagctccgcctgcgtggacgacacactgggtcaggttggcgcagtcaaagtcaaggaagagcccgtggactccgacgaggacgcacagatccaagagatggagagcggggaacaggctgccttcatgcaacagccttttctggagcctactcacacaagggccctgagtgtgcgccaggcacccctggcagctgttggcatggatggattggaaaagcatagacttgtgagtcggactcactccagccccgctgcctctgtcctgccacaccccgccatggatcggccactccagcctggaagtgctacgggcatagcctatgatccccttatgcttaagcaccaatgcgtctgtgggaacagcaccacacaccctgagcatgctggcaggatccagtccatttggtctaggctccaagagacaggtctgctgaacaaatgtgagaggatccaaggacgaaaagcgagtctggaagagatccaattggtgcactctgagcatcacagcctgttgtatggaaccaatccacttgacggccagaagctggatcctcgcattctgctgggcgatgatagccagaaattcttttcaagcctgccctgtgggggtttgggtgtggacagtgacacaatctggaatgaactgcacagtagcggcgcggcccggatggccgtcggatgtgtcatagaacttgcttctaaggtagcctctggggaacttaagaacggtttcgccgtagtacgaccacctggccatcatgccgaggagagtacagctatgggcttctgtttcttcaatagcgtcgccatcactgccaagtatttgcgagatcagctgaatatcagcaaaatcctcatcgtcgacctggatgtccaccatggaaacggtacacagcaggccttctatgcagatccaagcatcctttatatatctttgcaccggtatgacgagggcaactttttcccaggcagtggggcaccaaacgaagtgggaactggacttggggaaggatacaatatcaatattgcatggacaggcggcctcgatcctccgatgggcgacgtcgaatatttggaggcattccggactatcgtcaaaccagtggccaaggagtttgaccccgacatggtacttgtgtccgctggttttgacgccttggaaggacatactcctccgctggggggctataaggtgaccgctaaatgctttggccatctgacgaagcagttgatgacactggcagacggcagagtcgttctggccctggaaggtggccacgaccttaccgcaatatgtgacgcctctgaggcctgtgtgaatgccttgctcggaaacgagctcgagccgcttgccgaagatattctgcatcaaagcccaaacatgaacgctgtgatttctctgcagaagattatcgagatccagtccatgtccctgaaattttcttaa

SEQ ID NO: 593 - DNA, 438 bp, synthetic construct
  source 1..438: mol_type = other DNA
ccaagcggccacccccgatttaggtataaagaacatgaagatggttatatgagattgcagcttgtgcggtatgaatccgtcgagcttacacaacaactgctgcggcaaccccaggagggctcaggacttggcacctccctgaacgaatccagcctccagggcataatactggagacagtcccaggcgagccaggacgcaaagaagaagaggaggaaggtaagggatccgaggggactgctctgagcgcctcccaggacaatccaagtagcgtgatacacgtcgtaaaccaaacaaacgcccagggacagcaagagattgtttattacgtgttgtccgaggctcccggagagccaccccccgcccctgaacctcctagcgggggaattatggagaagctgcagggcatagccgaggagccagaaatccaaatggtgtaa

SEQ ID NO: 594 - DNA, 2925 bp, synthetic construct
  source 1..2925: mol_type = other DNA
tggatcctggacactgataccttcaatgaatggatgaacgaggaggattatgaagtaaatgacgacaagaacccggtgtctagacgcaagaaaatctctgccaagacactgactgatgaagtcaatagccctgatagcgacaggcgcgataagaagggcggaaactacaagaaaaggaagagatcaccctctccatctccaactccagaagcaaagaaaaagaatgctaagaaaggtccctccaccccctatactaaaagcaaacggggtcacagagaggaagaacaggaggatctgaccaaggacatggacgaaccctctcctgtgccgaatgtggaggaggtcacactgccaaagacagtaaacacaaaaaaggattccgagagcgcccccgtgaagggcgggacaatgacggatctggacgaacaggaggatgaaagtatggagaccactggcaaggatgaagatgagaattcaacaggcaataagggtgagcagaccaagaatccagacttgcacgaggacaacgtcactgaacagacccaccatattatcattccatcatacgccgcctggttcgattacaacagcgtccatgccattgaaagaagggccctgccagagtttttcaacgggaaaaataagtctaaaacacccgagatatacctggcctatcgcaactttatgatcgacacatatagactgaatcctcaagaatacctcacatctaccgcctgccgccgcaacctggctggcgacgtgtgtgccatcatgcgggtgcacgctttcctggagcagtggggacttataaactaccaggtggacgccgaatcaagacctactcccatggggcccccccctacatctcacttccacgtgctggccgacacgcccagcggccttgtgccactgcagcccaaaacccctcagcagacctcagcttcccagcagatgctgaactttccagacaagggaaaagaaaagccaacggacatgcagaactttggtttgcgcactgatatgtataccaaaaagaacgtccccagtaaatccaaggccgccgcatcagctacacgggaatggaccgaacaggagactctgctgctgctggaggctcttgagatgtataaggatgactggaataaagtatcagaacatgtgggatcaagaactcaagatgagtgcatcttgcacttcctgcggctccccatcgaggatccctatctggaggactcagaagcctccctgggtcctttggcataccagcctatcccattttcccagtccggaaacccagttatgagtaccgttgcgtttctggcatcagttgtagatccccgcgttgcttccgcggcagctaaatccgctttggaggaattttcaaagatgaaagaggaggtccctaccgccctcgtggaggcccacgttaggaaggtggaagaagccgctaaagtgacaggcaaggcagatcctgcgttcggcctcgagagtagcggtattgcgggcaccacaagcgatgaaccagagcgaatcgaggaatctggcaacgacgaggcacgagtggaaggtcaggccactgacgagaagaaggagcccaaagaacccagagaggggggcggcgctatcgaagaggaggcaaaagagaaaacctccgaggcaccaaagaaagatgaggagaaggggaaggagggcgattcagagaaagagtccgagaagagcgatggagatccgattgtagatcccgaaaaagagaaggagcctaaggaaggacaagaggaggttctgaaagaggtggtcgagtccgagggcgagagaaaaaccaaggtggagcgcgacatcggggaaggtaacctgagcaccgctgcggccgctgcactcgcagctgccgccgtgaaagctaagcacctggccgccgtcgaagaaagaaaaatcaagtccctggtcgcattgcttgtggagactcagatgaaaaagctggagatcaaactgcgccactttgaggagctggaaacgattatggatagagaaagagaggcgcttgaatatcagcggcaacagctgcttgccgaccggcaggccttccatatggaacaactgaaatacgcagagatgcgcgctcggcagcaacatttccagcagatgcatcagcagcaacagcagccaccgcctgcgctgccacctggttctcaacccatcccacccacaggggccgctggtccaccagcagttcacggcctcgctgtcgctcccgcgtcagtcgttcctgcccccgccgggtccggggccccccccgggagccttggcccatcagagcagattggtcaggcgggcagcaccgctggtccgcagcagcagcagcctgccggagctccacagcccggcgccgtgccacctggggttcccccgccgggcccacacggacccagccctttcccaaaccaacagacccccccgtccatgatgccgggagcggtacctgggtctggccacccaggtgtggccggaaacgcaccactcggactgcccttcggtatgccccctccacctccgccccctgcaccatctattattccgttcggcagcctcgccgattcaatctccattaacctcccggcgccgcccaacctgcacggacaccaccatcacctgcctttcgccccaggcaccctgccccccccgaaccttcctgtttccatggctaatccactccaccccaatctgccggctacaactactatgccttcaagcctccctctggggccggggcttgggtctgccgccgcccaatctccagccatcgtcgccgcggtccaggggaacttgctgccttccgcctcccccctgcctgatccagggacccccctccccccagacccaaccgccccctcaccggggactgtgacccccgtccctccaccccagtaa

SEQ ID NO: 595 - DNA, 1827 bp, synthetic construct
  source 1..1827: mol_type = other DNA
atggccgctgcagccgctgctgttgggcctggcgccgggggcgccggttcagccgtgccaggcggagcaggaccttgcgccactgtgtctgtcttccctggggctcgacttctcacgattggcgacgcgaatggggagattcagcgacacgcagagcaacaagctttgcgacttgaagtacgggcagggcctgatagtgcaggaatcgccctctattctcatgaagacgtctgtgtgttcaagtgttcagtgtcccgagagaccgagtgctctagggtcggtaaacagtcttttattatcactctgggatgcaactccgtgctgatccagttcgcaacccccaacgatttctgctctttttataatattctgaaaacgtgcaggggtcacactcttgaacgaagcgtgttctccgaaagaacagaggagagtagcgctgtccagtatttccagttttacggatatctgtctcaacagcagaacatgatgcaggattacgtgagaaccgggacatatcagagggccattcttcagaatcacacagatttcaaggacaagatcgtactggacgtgggttgtggatccggaatcctgagcttcttcgcggcgcaggctggtgctagaaaaatctacgcagtcgaggcctcaacgatggcccaacatgctgaggtgctcgtcaagtctaataatctgacagatcgcattgtggttatccccggcaaggtggaggaagtgtctctgcctgagcaggtggacatcatcatctccgagccaatgggctacatgctgttcaatgagagaatgttggaatcttaccttcatgcgaagaaatacctcaaaccatccggaaacatgtttcccaccattggcgacgtacacctggcgccctttaccgacgagcaactgtatatggagcagtttacaaaggcaaacttctggtatcagccgagctttcatggggtggatctgagtgctctccggggcgcagccgttgatgaatatttccgccagcccgttgtcgatacctttgatattcggattcttatggcgaaatccgtgaagtacacggtgaacttcctcgaggccaaggaaggcgacctccatcggatcgaaatccccttcaagttccacatgctgcactctggacttgtgcatggcctggccttttggtttgatgtcgccttcattggcagcataatgactgtgtggctgagcacagcccccacagagcctctgacacactggtatcaggttcgatgcctcttccagtccccacttttcgctaaagcgggcgacacactgtccggtacatgtctgctgattgcaaataagcggcaatcctacgacatctccatcgttgcccaggtggatcagactggttctaaatccagcaacctgctggacctcaagaacccattttttagatatactggcactacgcctagccctccccccggctcccattacacttcacctagcgagaacatgtggaacacaggctccacatacaatttgtccagcggaatggcagtggcagggatgccgaccgcatatgacctctcttctgttattgccagtggttccagtgtgggacacaataatctgatccccctcgcaaacaccgggattgtcaaccacacccactctcgcatgggaagtattatgagcactggcattgtccagggcagctccggggcacagggatccgggggggggtccactagtgcgcactatgctgtcaacagccagtttactatgggcggccccgctatttctatggcttctcccatgagtattccgaccaataccatgcactacggttcctaa

SEQ ID NO: 596 - DNA, 2241 bp, synthetic construct
  source 1..2241: mol_type = other DNA
atggccgaacctagccaggctccaacccctgcaccagccgcccaaccaagacccctccaatcaccggcacctgccccaaccccaacccctgcgccatccccggccagcgcccctattcccacacctacgcccgcacctgcgcctgcccctgccgctgcgccggccggatctacagggacaggtggacctggcgtgggctccggcggggcaggctcaggaggtgaccccgccagacctggattgtctcaacagcagagggcctcacagcgcaaggcccaggtaagaggattgccccgggccaaaaagttggagaaacttggcgtgttctctgcgtgcaaggccaacgagacttgcaaatgcaacgggtggaagaatcctaagccccctactgctcctcggatggacctgcagcagcctgcagcgaatctgagtgaactttgccggagctgtgaacaccctctcgccgatcatgtgtcacatctggagaatgtgtcagaggacgagattaaccgcctccttggcatggtggtcgatgtagaaaatctgttcatgtccgtacacaaggaggaagacaccgataccaaacaggtgtatttctatctgttcaagctgcttcggaagtgcatcttgcaaatgacaaggcccgtggttgaaggctctttgggttccccccccttcgagaaacccaatatagagcagggagtgctcaatttcgtgcagtacaagttcagtcacctcgctccccgcgaaagacagactatgttcgagctgagcaagatgttcttgctgtgtctcaactattggaagcttgagaccccagctcagttccgacagaggtctcaggctgaggacgttgctacctataaagttaattatacccggtggctttgctactgtcacgtgcctcagagctgtgattctcttcctcggtatgagactacacacgttttcggacggtcactcctgcgctccatcttcacggtgacacgccgccagctgctcgagaaattcagggtcgagaaggacaagctggtgccagagaagagaacactgatacttacccattttccaaagttcctctcaatgctcgaggaagagatctacggcgccaatagccccatttgggagagtggttttaccatgcctccaagcgaggggactcagctcgtgccaaggcccgcatctgtgagtgcagccgtcgtcccatccacacccatcttctcccctagcatgggaggtggaagcaacagtagtctgtcactcgattccgcgggtgctgagcccatgcccggtgagaagcggactttgcccgagaatctcaccctggaggacgcaaagaggcttagggtgatgggcgatatcccaatggagctggtgaacgaagtaatgcttactataactgatcccgctgccatgctggggccagagaccagcctgttgtccgccaatgctgcaagggatgaaacagctcggcttgaagaacgacgcgggattattgagtttcatgtcattggtaatagtctgaccccgaaagccaatcggcgagtcctcctgtggctcgtcggtttgcagaacgtcttttcccaccagttgcctcggatgcctaaggagtacatcgcgcggcttgtattcgaccctaagcataaaacgctggctctgatcaaagacggccgagtgattgggggaatctgcttccgcatgtttccaacacaaggattcacagaaattgtgttttgcgccgtgaccagtaacgaacaggtgaaaggttatggaacgcaccttatgaaccatcttaaggagtaccatatcaagcataatatactgtattttctgacgtacgccgatgagtatgcgatcggatatttcaagaagcaaggatttagtaaagacataaaagtgcccaaatcacggtacctgggttatattaaggattacgagggcgccactctgatggaatgcgaactgaatccaaggattccttataccgaactgtctcatattatcaaaaagcagaaagagatcattaagaaactgattgagcgcaagcaagcccagatcaggaaagtctatcctgggttgtcctgctttaaggaaggcgttaggcagatccctgtcgaatccgtgcctggcataagagaaaccggctggaagcccctcggtaaagaaaaaggcaaggagctgaaggacccagatcagctctatacaacgcttaaaaatctcctggctcagatcaaaagttaa

SEQ ID NO: 597 - DNA, 1542 bp, synthetic construct
  source 1..1542: mol_type = other DNA
atggcagaagtgggagagatcatcgagggatgcaggctccctgtcctcaggcggaaccaggacaacgaagacgaatggcccctcgctgagattctgtcagttaaggatatcagcggccgcaaattgttctacgtacactatatcgacttcaataagcggctggatgagtgggtcactcacgaacgcctggacctcaaaaagatccagtttcccaaaaaagaggcaaagacacccactaagaatggtttgcccgggtccagaccaggaagccccgagcgggaagttcctgcaagtgcgcaggccagcgggaaaacccttccaatccctgtgcagattaccctccgctttaacttgcctaaagaaagggaggccattcccgggggggagcccgatcagcccctctccagctcttcttgcctgcagcccaaccaccgcagtaccaaacggaaggtcgaggtggtgagtcccgcaactcctgtgccatctgagacagcacctgccagcgtttttccacaaaatggggccgctcgacgcgcggtcgccgcgcagcccgggcgaaagaggaaatccaattgtctggggactgatgaggactcccaggacagctccgacggcatcccatccgcgccccgaatgaccggctctttggtcagcgaccgaagtcacgacgatattgttactcgcatgaagaacattgagtgtatagagcttggtcgacatcgattgaaaccctggtacttttccccttacccgcaggaattgactaccctcccggttctctatctttgcgagttctgtctgaagtatggccggtccctgaaatgtttgcagaggcatctcacgaaatgtgacctgaggcaccctccgggaaatgagatttatcgaaagggaacgatcagtttttttgaaatcgatggaagaaaaaacaagtcatattcacaaaacctctgcttgttggcaaagtgtttcctggaccataagacactctactacgatactgaccccttcctgttttatgtcatgaccgagtacgactgtaagggattccatattgtgggctactttagcaaggagaaagaatcaacagaggattacaacgtggcatgtatactgaccctgccaccctaccagcgacgcggttatggaaagttgctgattgagttttcatatgaattgagtaaggtggagggtaaaacaggtacccccgaaaagcccctctccgatttgggtttgctttcctatagaagctactggagccagactattttggagatcctgatgggcctcaaatcagaaagcggggagagaccccagataacaatcaatgagatctccgagatcacttccatcaaaaaagaagacgttatttccaccttgcagtacctgaaccttatcaattattataagggccagtacatcctgactctttccgaggacatcgtcgatggtcacgagagagccatgctcaaaagacttttgcgaatagatagtaagtgcttgcacttcactccaaaagactggtccaagagagggaaatggtaa

SEQ ID NO: 598 - DNA, 3078 bp, synthetic construct
  source 1..3078: mol_type = other DNA
atgcatcggaaaaaagtagacaataggatccggatactcatcgaaaatggcgtggccgagagacagaggtccttgttcgtcgtggtcggcgatcgcggcaaagaccaagtggtgatcctgcatcacatgctgagcaaggccaccgtgaaagcccgaccctcagtactctggtgttacaagaaagagctcggcttctcctctcatagaaagaagcggatgcggcagctccagaagaaaatcaaaaatgggactttgaacatcaaacaggacgatccatttgagctctttatcgccgccaccaacatcagatactgttattacaatgaaacccacaaaattttgggcaataccttcggaatgtgcgtgttgcaggactttgaggcactcactcccaaccttttggcgagaactgtggaaactgttgagggcggcggcttggtggtgattctgctgcggactatgaacagcttgaagcagctgtacaccgtaacaatggacgtgcactctcggtatcggactgaagcccatcaagacgtggttggaagatttaacgaacggttcattctgtctctggcttcttgcaaaaagtgtctggtgattgatgaccagctcaacatcttgcctataagcagtcacgtagccaccatggaggcactgccacctcagacccctgacgagagcctgggcccaagtgatcttgagttgagggagttgaaggaaagcctgcaagatacacagccagtgggggtgctggtagattgttgtaaaacactcgaccaagcaaaagcagtgctgaaatttattgaggggatctccgagaagacacttaggagcactgtcgccctcacagctgcacggggtagaggcaagtccgccgcccttgggctcgcaattgccggcgctgtggcttttggctactctaacattttcgtcacgagtccttctcctgataaccttcatactctgtttgaattcgtgttcaaaggcttcgatgccctgcagtaccaagaacatcttgactatgagattatccagagcctcaacccagagttcaacaaggccgtcattcgggtgaatgtcttccgcgaacatcggcagactattcagtatatccatcctgccgatgccgttaaactgggacaagctgaactggtggtcatcgacgaggccgctgcgatccccctgcccctggtaaaaagcctgctcggcccttaccttgtgtttatggcaagtaccatcaacggctacgagggcaccggacgctctcttagcctgaaacttattcagcaacttagacagcagagcgctcaaagccaagtaagcactaccgcagagaataagaccactactaccgctcggttggcaagtgccagaacgctgtatgaggtcagcctgcaggaatccattcgatatgcacccggagatgccgtggagaagtggctcaatgacttgctgtgtctggactgtctcaatattacacgaatcgtatcagggtgcccgctgccagaagcgtgtgagctgtattatgtcaatcgggacactctgttttgctaccacaaggccagcgaagttttccttcagagactgatggctctttatgtcgctagtcattataagaacagccctaatgatctgcagatgcttagcgacgctcctgcccaccacctcttctgtctcctgccccccgtaccacccacacaaaatgcacttcccgaggtgctggcagtcatacaggtgtgcctggaaggggagataagcaggcagtctatcctcaattccttgtcacgaggtaagaaggcatctggggatctgattccttggaccgtctccgaacaatttcaagacccggatttcggagggttgtcagggggccgggtagttaggatcgcagtgcacccagattaccaggggatgggatacggctctagggcacttcagctgctgcagatgtactacgaggggaggttcccttgcctggaggaaaaagtcctggaaactcctcaggaaatacatacagtttcctccgaagctgtgagcctgctggaagaagtgataactccccggaaggatctccccccgctgctgttgaaactcaatgaaaggcccgccgaaaggctggactatctgggtgtctcctatgggctgactcctcgcttgctgaagttttggaagagggccggcttcgttccagtctatcttcggcaaaccccaaatgatctcacgggagagcatagttgcatcatgctgaaaactctgactgatgaggatgaagccgaccaaggcggatggctggctgccttttggaaagatttcagacggagatttcttgcactgcttagctatcagttcagtaccttctctcccagtctggccctcaatattatccaaaacaggaacatgggcaagcccgcacagcctgcgctgtcacgggaagaactcgaagctttgttcctcccgtacgatcttaaacggcttgaaatgtactccagaaacatggtggattatcatctgatcatggacatgatacctgccatctccagaatctattttcttaaccaactgggtgacttggctctctccgctgctcagagtgcgctcttgctcggcatcggactgcaacacaagtctgtcgatcagttggagaaggagattgagcttccgagcggtcaactcatgggactgtttaacaggattatcagaaaggtggtgaagctgttcaatgaagtacaggaaaaagccatagaagagcagatggtggccgctaaggatgtcgtgatggagcctacgatgaagacactttctgatgatcttgacgaggccgcaaaagaatttcaagagaaacacaagaaagaggttggtaaactgaagtcaatggacttgtcagagtacatcattcgcggcgacgacgaggagtggaacgaggtcctcaataaggctggtccaaacgcctctatcatttctctgaagtctgataagaaaaggaaacttgaggccaaacaggagccaaaacaatctaaaaagctcaaaaatcgggagactaagaataagaaagatatgaagctcaagagaaaaaagtaa

SEQ ID NO: 599 - DNA, 1251 bp, synthetic construct
  source 1..1251: mol_type = other DNA
atggcaggcgacacccactgtcctgcagaaccacttgccagggaggggaccctgtgggaagcattgagggctcttcttccgcacagcaaggaggatctgaaactggacctgggcgagaaggtcgaacggagcgttgttacccttcttcagcgagcgaccgagctgttttacgagggacggcgggacgagtgcttgcagtcttctgaggtaattctggactattcatgggagaagctgaacacaggtacttggcaagacgtcgacaaggactggcggcgggtgtacgctattggctgtttgctgaaagcactttgcctttgccaggcacccgaagacgctaacacagtagctgctgctttgcgcgtctgtgacatgggcctgctcatgggggcagcaattctgggtgatattctgctgaaggtcgccgccatccttcagacccatctgcccggcaagcgccctgcacggggcagtctccccgaacagccctgcaccaagaaggcgagagctgaccacgggttgattcctgatgtcaagctggaaaaaacggtcccaaggctccacagaccgagcctgcagcacttcagagagcagttccttgtgccaggacgcccggtaattcttaagggtgtcgccgaccactggccttgtatgcagaagtggtcattggagtatattcaagagatagctggctgccggactgtccccgtggaagtaggttctcgatacaccgacgaagaatggagccagacgctcatgacggtgaacgagttcatatctaagtacatagtcaacgagccaagggatgtgggataccttgcccagcaccagttgttcgaccagatccccgagctgaagcaggacatctctattcccgactactgctctctcggtgatggggaagaggaggaaatcactataaacgcatggttcggccctcagggaacgataagcccccttcaccaagacccacaacagaatttcttggtgcaggttatggggaggaaatacattcggctgtattcaccgcaggagtctggagccctttaccctcatgacacccatctgctgcataataccagccaggtagacgttgaaaaccccgacttggagaaattccctaagtttgccaaagctccgttcctgagctgtatcctcagtcctggagagatcttgtttattcccgttaagtactggcattacgtgcgcgccttggacctgagctttagtgtcagcttctggtggtcctaa

SEQ ID NO: 600 - DNA, 1383 bp, synthetic construct
  source 1..1383: mol_type = other DNA
cagttcaacatcgactcaatggtgcataaacacgggctggaattttacgggtatataaaactgatcaacttcattagacttaagaaccctacagtcgagtacatgaattccatttataacccagttccatgggaaaaagaggaatacctgaaacccgtactcgaagacgaccttttgcttcagtttgatgtcgaagacctgtatgaaccagtatccgtaccctttagttacccaaacggcctcagcgagaatacatcagtcgtagagaagcttaagcacatggaggctcgcgcgcttagcgccgaagccgcccttgcaagggcgcgagaagatctgcaaaaaatgaagcaatttgcccaagattttgtcatgcacactgatgttcggacttgcagcagttcaacatcagtcattgctgatcttcaggaagacgaggacggcgtttacttttcctcatacggccattatggcatacacgaagaaatgctgaaagacaaaatccgaactgaaagctaccgcgacttcatctaccagaatccccatatatttaaagacaaggttgtgctggacgtaggatgcggcacgggaatcctgagtatgtttgccgctaaagccggagcaaaaaaggtgctgggagtggaccagtccgagatactgtatcaggccatggacattatacggctcaacaagctcgaagacaccatcaccctgatcaagggtaaaattgaggaggttcacctgccagtggaaaaagtcgacgtaattatatctgaatggatgggatacttcctgctgttcgagtccatgctcgacagcgtcttgtacgctaaaaataagtatctggctaaaggcggcagcgtgtatcccgatatctgtactatttccctggtcgcagtgtctgacgttaataaacatgccgaccgcattgcgttttgggacgatgtgtatggatttaagatgagctgtatgaagaaggccgttattcctgaagctgtggtcgaagttctggatcccaagacacttatctcagagccatgcggaatcaaacatatcgactgtcatacgacaagcatctctgacctggagttttccagcgattttactttgaagataacccgaacatccatgtgcaccgcgatagccggatatttcgatatctatttcgaaaagaactgtcacaacagagtggtgttcagtacggggcctcagagtacgaaaactcactggaagcagactgtgttcctgctggaaaaacccttttcagtgaaagctggggaagccttgaaaggaaaggtgaccgtgcacaagaataaaaaggaccctcgctccctgaccgtgaccctgacattgaataattctacccagacctatgggcttcagtaa

SEQ ID NO: 601 - DNA, 1170 bp, synthetic construct
  source 1..1170: mol_type = other DNA
atggccgagccagacccctcacatccccttgagactcaggcagggaaagtgcaggaagctcaggacagcgatagcgactctgagggtggcgccgccggaggggaagccgatatggacttcttgaggaatctcttcagccagacccttagcctgggtagccagaaggaaaggctcctcgatgagctgacactggagggcgtggcccggtacatgcagagtgagcgatgcaggcgagttatctgcttggtaggcgcgggcatctcaacttctgcaggcatacctgactttcgctcaccctctacaggactgtatgacaatctggaaaaataccatctcccttaccctgaagccatctttgagatcagttatttcaaaaaacacccggagccttttttcgcactcgctaaggaactgtatcccggacagttcaagccaaccatatgccattatttcatgaggctcctgaaagacaaggggctgttgctgcgctgttacacgcaaaatattgacaccctggagcgcatcgccggactcgaacaggaggacctggtcgaagcccacggcacattttatacttcccactgcgtttcagcgtcatgtaggcacgagtaccccttgtcctggatgaaggaaaaaatcttctcagaagtgacccccaagtgcgaggattgccagagccttgtgaagcctgacatcgtatttttcggggaatccctgcccgcccgcttcttctcctgcatgcagagtgacttcctgaaggtggacttgctgctggtgatgggaacttccctgcaagtacagccttttgcgtccctcatttctaaagcccccctgtctactccaagactcctgattaataaagagaaagccgggcagagcgatccgtttctggggatgattatgggcttgggaggcggtatggactttgacagcaagaaagcatacagagatgtcgcctggctgggtgagtgtgaccagggctgtctcgcactggcagagctgttgggatggaagaaagagctggaggacttggtcaggcgcgagcatgccagcatcgacgcacagtctggggccggcgtcccgaacccaagcacgtcagcaagtccaaaaaagtcccctcctccagctaaagacgaggctcggaccacagaaagagagaaaccacagtaa

SEQ ID NO: 602 - DNA, 2220 bp, synthetic construct
  source 1..2220: mol_type = other DNA
atgagtgaggcagggggggccggccctggtggatgcggtgctggtgctggcgctggagcggggccaggggctcttccaccacagcccgcggctctgcctcccgccccaccgcaagggtccccctgtgcagctgcagctggagggagcggcgcctgcggccccgctactgcggtcgcggccgccgggacagctgaggggccaggggggggaggatctgcgcggatcgctgtgaagaaagcacagctgaggagtgcccctagagcgaaaaaactggaaaagctcggtgtgtatagcgcctgtaaagccgaggagagctgcaagtgtaacggttggaagaaccctaatcctagcccaactccccctagagccgacctgcagcagattatcgtctccctgactgagtcctgtagaagctgcagtcacgctctggccgcccatgttagccacctggaaaatgtctcagaggaggagatgaaccggctgctcggcattgtgcttgatgtagagtatctgttcacttgcgtccataaggaagaggacgccgatactaagcaggtatacttttatctgttcaagctgttgcgcaaatccattttgcaaagaggcaagccagtcgttgaggggtcactggaaaaaaaacccccatttgaaaagccatccattgagcaaggggttaacaacttcgtgcagtataaattttcccatctgcccgccaaggaacgccagaccatcgtggagttggccaagatgttcttgaacaggatcaattattggcacttggaggctccaagccagcggcgcctgagatcaccaaatgacgatatctctgggtataaggaaaactacactagatggttgtgctattgtaatgtgcctcaattttgcgactcactccccagatatgagactacacaggtattcgggcgcaccctcttgcgcagcgtttttaccgtgatgcgcaggcagctgctcgaacaagcccgacaagagaaggacaaacttccactcgagaagcggaccctcatcctcacacacttcccaaaatttttgagcatgttggaagaggaagtctacagccaaaattcaccaatttgggatcaagactttctgtccgcctcttccaggacttctcaacttggcattcagactgtcataaaccctcctcctgtagcaggcaccatatcttataattccacgagttctagcttggagcagcccaatgccgggagctcctctcctgcgtgcaaggcttctagcggcctcgaggcaaatcctggagaaaaaagaaagatgacagacagccacgttctcgaggaagccaaaaagccaagagtgatgggcgatatcccaatggagctcatcaatgaagtcatgtctaccattactgaccccgctgctatgctgggtcccgagacgaacttcctgagcgcccattccgctcgagacgaagccgccaggctggaagagaggcgcggtgtcatcgaattccatgtcgtggggaatagcttgaaccaaaagccaaataagaagattctcatgtggctggtaggactccaaaatgtttttagtcaccagctgccccggatgccaaaagagtatatcacccgattggtctttgatccaaagcacaaaactcttgccctcatcaaggatggccgggtcataggaggcatatgtttccggatgtttcctagtcagggctttactgagattgtgttctgtgccgtgacatctaacgaacaagtgaaaggttatggaacccatcttatgaaccatcttaaggagtaccacatcaagcacgacatcttgaattttctcacatacgccgatgaatatgcaatcggctatttcaaaaagcagggattcagcaaggaaatcaaaattccgaagaccaagtacgtgggctacattaaggactatgagggtgccacactgatgggctgcgaactcaatcctcggatcccctatactgagttcagcgtgataatcaaaaagcagaaagagatcatcaagaagctcatcgagcgcaaacaagctcagatccgcaaggtctatcctgggttgtcatgctttaaagacggagtaaggcagattccaattgagagtattcccggtataagggagacagggtggaaaccaagtggaaaggagaagagtaaagagcccagagaccctgatcaactctactccacacttaagagcatccttcagcaggtgtaa

SEQ ID NO: 603 - DNA, 1938 bp, synthetic construct
  source 1..1938: mol_type = other DNA
atgcccgcacgcactgccccggccagagtccccacactggctgttccagcaatctcactccctgacgacgtcaggcggaggctgaaggaccttgagcgggactctttgaccgagaaggagtgcgtgaaggaaaagctcaacctgttgcacgagttcctgcagaccgagattaaaaatcagctgtgcgacctggagacaaaacttcgcaaggaggagctcagtgaagagggctacctcgccaaagtcaagagcctccttaacaaggatctctccctcgaaaatggcgcccatgcctacaacagggaagtaaacggacgcctggagaacgggaatcaggcccgcagcgaagcccgaagggtgggtatggcagatgccaatagcccaccaaaaccactttcaaagccccgcactccacgccgcagtaagtccgatggcgaggccaagccagaacccagccccagccccaggattactcgaaagagtacccgccagacaactattacatcacacttcgctaaggggcctgcaaagcggaaaccccaggaggagagcgagagagccaaatccgacgaatctatcaaagaggaggataaggatcaggatgagaagaggcgaagagttacctccagggagcgagtcgcccggcccctcccagccgaagagccagaacgagccaaatctggtaccagaaccgagaaggaggaggagagggacgaaaaagaagagaaacggctccgctcccagacaaaggaaccgacccccaagcagaaactcaaagaggagccggatcgggaggccagggcaggcgttcaagctgatgaagacgaagatggtgatgaaaaggatgaaaaaaagcaccggagtcagcccaaggacctggccgcaaagcgcagaccggaagagaaggagccagagaaagtgaaccctcaaatctcagacgagaaggatgaagacgagaaggaggagaagcgccgcaaaacaactccaaaggaacctaccgaaaaaaaaatggccagggccaagaccgtaatgaattctaaaacccatccaccgaagtgtatacaatgcggacagtacctggatgatccagatcttaagtatggacaacatccaccagacgcagttgatgaacctcagatgctgactaatgaaaaacttagtatcttcgacgcaaacgaaagtggattcgaatcctatgaagctctgcctcaacacaagctcacctgcttctcagtttattgcaagcatgggcacctgtgtccaattgataccggccttatcgagaaaaacatcgaactcttcttttcagggagcgccaagcccatatacgacgacgatccaagcctcgaggggggagtgaatgggaaaaatcttggccctatcaatgagtggtggatcaccgggttcgacggtggagagaaagctctgatcggttttagtacaagcttcgctgagtatattttgatggatccctctcctgagtacgccccgatttttggccttatgcaggaaaagatctatatcagcaaaatcgtagtcgagttccttcagtctaactccgattctacatatgaggacctgatcaataagatagagacgacagtccccccatccggcctgaacctgaacagattcaccgaggattccctgctgcgccacgctcagtttgtggtagagcaggtcgagagttacgatgaagctggcgatagcgacgagcagccaatcttcctgaccccatgcatgagagatctgattaaactggccggggtgacgttgggacaaagacgggctcaggccagacggcagaccatccgccactccacccgggagaaggaccggggccctaccaaggctactactacaaaattggtttatcagatttttgatacattcttcgcagagcagattgagaaggacgacagagaggataaggagtaa

SEQ ID NO: 604 - DNA, 2775 bp, synthetic construct
  source 1..2775: mol_type = other DNA
aacatggccatgaaagaagctgacgacgatgaagaggttgacgataatatccccgagatgccttcaccaaagaagatgcaccagggaaagaaaaaaaagcagaacaagaaccgaatttcctgggtgggggaggctgtaaaaactgacgggaagaaatcctactacaaaaaggtgtgcatcgacgcagagactctggaggtcggcgattgtgtttcagtgatccccgacgattcatctaagccactttatctggcacgggtgactgccctctgggaggactcctcaaatggacaaatgtttcatgcgcactggttttgcgccgggacagatacagtgctgggggcaactagtgacccattggagctttttctggttgacgaatgcgaggatatgcaactcagttacatccactccaaagtaaaggtgatctataaggcaccttccgagaactgggcgatggaaggcggcatggaccctgagtctctgctggaaggggatgacggtaagacatacttttaccagctctggtatgaccaggactatgccagatttgagagccccccaaagactcagcccaccgaagacaataagtttaaattttgcgtgtcctgcgcccggcttgccgagatgaggcagaaagagatccccagagtgctcgaacagcttgaggacctggactcccgagtgctctattattccgccactaagaatggtattctctacagagtcggcgacggcgtgtacctcccaccggaggccttcactttcaacattaaactttcctcccccgtcaaacgccctaggaaggaacccgtagatgaagatctttatcccgaacactatcgcaaatattcagattatatcaaagggagcaacctggacgctcctgagccctaccgcatcgggaggattaaggagatcttttgtccaaaaaagtcaaacgggaggcccaatgagacagatataaagatccgggtgaacaagttctatagaccagaaaatactcacaagtctacaccagccagctatcacgctgatatcaacctgttgtactggtctgatgaagaggcagttgtggatttcaaagcggtgcaaggtcgatgtactgtagagtacggggaggacttgccggaatgtgtgcaggtttacagcatgggaggtccaaacagattttacttcttggaggcctacaacgcgaaaagcaagtcttttgaggaccctccgaaccatgcgcgctccccgggtaataaaggcaagggtaaaggaaagggaaagggaaaaccgaagtcccaggcctgcgaaccatctgagccagagattgaaattaaacttcccaagcttcgaaccctggacgtattttccggctgcgggggactgagcgagggttttcaccaggccggaatttccgacaccctgtgggcaattgagatgtgggaccccgccgcccaggcctttagacttaacaatccagggagcacggtcttcacagaggactgcaatatcctgctgaaactcgtgatggctggagagacaacgaactctagaggccaaagattgccacaaaaaggagacgtagagatgctgtgtggcggccccccatgccaagggttctctgggatgaatcgatttaactctaggacttattctaaatttaagaactctcttgtggtgtctttcctgtcttattgcgactattatcggccacgattctttctcttggaaaatgttaggaactttgtgtcatttaaacgcagcatggtgctcaagcttactctgagatgcctggtgagaatgggctaccagtgtacattcggcgtcctccaagcagggcagtacggcgtggcgcaaacacggagaagggctattatcctcgctgcagcccccggagagaaactgcccctgttcccagaacccctgcacgtgttcgctccccgggcttgccagctctcagtggtggtcgacgacaaaaaatttgtctctaatatcaccagattgtcatctggccccttccggactattaccgtgcgggataccatgtcagatctgcctgaagtgagaaatggagcctccgcactggaaatctcatataatggcgagccacaatcatggttccagaggcagctccgcggagcccagtatcagcccatactcagggaccatatctgcaaggacatgagcgcgcttgtcgcggcgaggatgcgccatataccccttgccccgggttccgactggagagacttgcccaatattgaggtacggcttagtgatgggacaatggccagaaaactgcgctatacccaccacgacaggaagaacggtcggagcagcagtggcgccctgcggggggtttgctcatgtgtggaggccggcaaggcgtgcgaccctgcggcacggcaattcaacaccctgattccgtggtgcctccctcacacaggaaataggcataaccactgggccggcctttatggtcgcctggagtgggacggctttttttctacaactgttaccaaccccgagcccatgggaaaacagggtcgagtgctccacccagagcagcaccgggtggtgtcagttcgggagtgtgcacgatcccaaggcttccctgatacctacaggctgttcggcaatattctcgacaagcaccgccaagtgggcaacgcggtgccaccccctctggccaaggctatcggactcgagataaagttgtgcatgctggccaaggcacgcgagagtgcatcagcaaagattaaggaggaagaagcggccaaggactaa

SEQ ID NO: 605 - DNA, 537 bp, synthetic construct
  source 1..537: mol_type = other DNA
agcgacggcctgagagcggaggacggtttcgaagatcaaatccttatccctgtgccagctccggcagggggcgatgatgattacatcgaacaaaccttggtcacagtggccgccgcagggaagtctggggggggaggatcaagcagctccgggggtgggcgggtcaagaaaggggggggtaagaagagcggcaaaaagagctacctttccgggggcgcaggagccgcaggcggtggtggggcggatcctggtaacaaaaagtgggagcagaagcaggtgcaaatcaagacactcgaaggtgagttttccgttacaatgtggagcagtgatgagaagaaagatatagaccacgaaactgtggttgaagaacagattataggggaaaatagtccccctgattatagtgagtatatgaccgggaaaaaattgcctccagggggcattcccggcattgatctctcagatccaaagcagctggccgaatttgcaaggatgaaaccccggaagattaaagaggacgatgcaccaaggacataa

SEQ ID NO: 606 - DNA, 417 bp, synthetic construct
  source 1..417: mol_type = other DNA
ctccggacttctactaagcggaagcaggctgacataacttcaagctcttctagcgatatcgaagacgatgatcagaactccattggggaaggcagcagcgatgaacagaagatcaagcctgttactgaaaatctcgtgctgagttcccacactggtttctgtcaaagcagcggggacgaagccttgtctaagtcagtgccggtgactgtagatgacgacgatgatgacaatgaccctgaaaacaggatcgcgaagaagatgctcctcgaggaaattaaggccaatctttcatctgacgaagacgggagctcagatgatgaaccggaagagggcaagaagagaacagggaagcagaacgaggagaacccaggggatgaagaggctaaaaaccaggtaaatagcgagtccgactcctaa

SEQ ID NO: 607 - DNA, 2739 bp, synthetic construct
  source 1..2739: mol_type = other DNA
aaaaccaaaaaatctccagggtccggatgtattctggcccactgtatgggactgggaaagactctgcaggttgtctcatttctgcacactgtgctgctctgcgataaactggacttttcaaccgctttggtggtttgcccattgaacaccgctctgaattggatgaacgagttcgagaaatggcaggaaggtctcaaagatgacgagaaactggaagtgagcgagctggccaccgtcaaaagaccccaggagcgatcctatatgctgcagcggtggcaggaggatggaggagtcatgatcatcggttatgaaatgtatcgcaacctggcccagggaaggaacgtgaaatcaagaaagctgaaggaaatcttcaacaaggctctggttgaccctggaccagatttcgttgtctgtgatgagggacacattctgaagaatgaagcgagcgccgtgtctaaagccatgaactccattaggagccggagaaggatcatactcactgggaccccgttgcagaacaaccttatcgagtaccactgcatggtaaattttataaaggaaaacctgttgggttccatcaaggaattccgaaaccgatttattaatcccatccagaacggccagtgtgctgatagtactatggtcgacgtaagagtgatgaagaaaagggcgcatatactctacgaaatgttggctggatgcgtccagcggaaggactacacggctcttactaagttcctgccacctaagcatgagtatgtcctggcggtccgcatgacatccattcagtgtaagctttaccagtattatctggaccatctgaccggcgtgggaaacaatagtgagggcggcaggggaaaggcaggcgccaaacttttccaggacttccagatgttgtcacggatctggacccatccctggtgccttcaactcgattacataagcaaggaaaacaagggatattttgatgaagactcaatggatgaattcattgcatctgatagcgatgaaacgtctatgagtctctcaagtgacgactatacgaagaagaagaagaaggggaagaagggaaagaaggatagctcttcctccggatctggctccgacaacgacgtggaagtcattaaggtctggaacagcaggagcagaggcgggggggagggaaatgtggatgagacaggcaacaacccgtcagttagcttgaagctggaggagtcaaaagccactagtagttctaatccaagctctcctgcaccagactggtataaagattttgttaccgatgccgacgccgaagttctcgagcattccgggaaaatggtgctgctctttgagattctgagaatggcggaggagattggagataaagtgctggtgttttctcagtcattgatctctctcgacctcatcgaggattttctcgagttggccagtagagaaaagaccgaggacaaagataagcctctgatttataagggggagggcaagtggctgagaaatatagactactacagactggacggttcaaccaccgcacaaagcagaaagaagtgggctgaggagttcaatgacgaaaccaatgtgcgaggacgattgtttataatttctactaaggccggctctctggggattaatcttgtggccgctaatagagttattattttcgatgcaagttggaatcccagctacgatattcaatccatcttccgcgtctataggtttggacagacaaagcccgtatacgtgtaccgcttcctggcccagggcacaatggaagataaaatctacgacagacaagtgacaaaacagagcctgagcttccgcgtcgtggaccagcaacaggtggaacgccacttcactatgaatgaacttacagaattgtatacgttcgagcctgatcttcttgatgacccaaacagtgagaaaaagaaaaaacgagatacacccatgctccccaaggacactatccttgctgaactgcttcagatccacaaggagcatatcgtaggatatcacgaacacgattctcttctcgaccacaaggaggaagaagaactcacagaggaggaacggaaggcagcatgggccgaatacgaagctgaaaaaaaaggcctgactatgcgatttaacattccgacgggcaccaacctgcctccagtgagttttaatagccagactccgtacatcccttttaacttgggcgcattgagcgccatgagcaatcaacaacttgaagacctgatcaaccaaggccgggagaaagtcgttgaggcgaccaatagcgttacagcggtgagaatccagccactggaggatatcatctccgcagtttggaaggaaaatatgaacctgagtgaggcacaggtccaggctctggcccttagcaggcaggcgagccaagagttggatgtgaagcgccgcgaggcaatctacaacgacgtactgaccaaacagcagatgctcattagttgtgtgcaaagaattctgatgaatcgccggttgcaacagcagtataatcaacagcagcagcagcaaatgacttatcagcaagccaccctgggacatctcatgatgcccaagccaccaaatctgattatgaacccttctaattatcagcagattgatatgaggggaatgtaccagcccgtggctggaggcatgcagccaccccctcttcaacgggctcccccgccgatgagatcaaaaaatccaggacccagccaagggaagtcaatgtaa

SEQ ID NO: 608 - DNA, 1662 bp, synthetic construct
  source 1..1662: mol_type = other DNA
atggcagccgtatctcttaggctgggtgacctggtttggggcaaattggggcgctaccccccctggcctggaaaaatcgtgaacccaccgaaggaccttaagaaaccacgaggcaagaagtgcttctttgttaaatttttcggcacggaggatcacgcctggattaaagttgagcaacttaagccgtaccacgcgcataaggaagagatgattaaaattaacaaggggaaaaggtttcagcaagcggtagatgcagtcgaggagttccttcgcagggctaaggggaaagaccaaacttccagccataacagtagcgatgataagaacaggcgaaactcttccgaggaaaggtcccgcccaaattccggcgatgaaaaacgcaagcttagcctgagtgagggcaaggtgaagaagaatatgggggagggcaaaaagcgcgtctcttcaggaagttccgaaagagggtcaaaatcaccactcaagagggctcaggagcagtctcctagaaaacgcggacgaccgcctaaagacgagaaagatcttactatacctgagtcatccacagtcaagggcatgatggctggacccatggccgcattcaaatggcagccaacagcatctgagcctgtgaaggacgccgaccctcactttcaccacttccttctcagtcagaccgaaaagccagcggtctgttaccaggccataacaaagaaacttaagatctgtgaggaagaaactggctctacttcaattcaagcagcggattccacagccgtgaatggaagcatcacacctacagacaagaaaatcggatttctcggtctgggactgatgggcagcggcattgtcagtaacctgttgaaaatggggcacaccgtcactgtgtggaatcggactgccgaaaaatgcgacctctttatacaggaaggcgccaggctggggcggacacctgctgaggtcgtgtctacatgcgacattacctttgcctgcgtgagtgatccaaaagcagccaaggacctggttcttggcccttccggggtactccaagggatccggccgggaaagtgctatgtggacatgtccaccgtggatgctgacacggtgacagagcttgcccaggtgatagtaagtcgaggaggaaggtttctcgaggctccagtttcaggaaatcaacagctgtccaatgatgggatgctggttattctcgccgccggcgaccgaggcctgtacgaagattgctctagctgttttcaggccatgggaaagacctcattcttcttgggagaagtcggcaacgctgcaaagatgatgttgatcgtgaatatggtacagggctctttcatggcgactatagctgaagggttgaccctggcccaggtgactggtcagagccagcaaacactgctggacatcctcaatcaaggacagttggcaagcatttttcttgatcaaaagtgtcaaaacattcttcaggggaactttaagccagatttttacctcaaatacatccagaaggacctgagactggctattgcactgggagatgctgtgaaccaccctactcccatggctgcagccgcaaacgaagtctataagcgggccaaagccctggatcagtctgacaatgacatgtctgctgtctatagagcgtatatacattaa

SEQ ID NO: 609 - DNA, 873 bp, synthetic construct
  source 1..873: mol_type = other DNA
tacgacgagattccaacagcagagagcctggtgataagagtggtgagtagcgtggataaaaaactggaggtgaagccaaggttcctggagatctttcgggaagacagctacccgaccgagtttgcgtataagagtaaagttgtgctgcttttccaaaagattgaaggagtcgaggtctgcctgttcggaatgtacgttcaagaatttggcagcgagtgcgcttttccaaaccagagaagggtttatctctcatacctcgattcagtcaaatactttcgcccagaagtcagatcttacaatggggaggctctgaggacattcgtgtatcacgagatcctgatcgggtatctggagtactgcaaacttagaggatttacttcatgctacatctgggcatgccctcctctgaaaggagaggactacatcctgtattgccatcccgaaattcagaagacacccaagagcgacaagttgcgagagtggtacctggccatgctgaggaaagctagcaaggagggtatcgtggccgaaaccataaacttgtacgatcacttctttatgcagaccggcgaatgtcgggctaaggtcacagcagcacgcttgccctattttgacggcgactactggccgggtgccgcagaggatctgatctaccaaatgtcacaggaggaagatgggaggaaggggaataagaagggaatgctcaagaaaaccattacaaaacgagccctgaaagcaagcggacagaccgacctgagcggcaatgcttcaaaagatttgctgctgatgcatcgccttggcgagaccatacatcccatgaaggaagatttcattatggtgcatcttcagccgagttgcacgcattgctgttaa

SEQ ID NO: 610 - DNA, 1092 bp, synthetic construct
  source 1..1092: mol_type = other DNA
atggccagtgctgtctctccagccaatttgcctgctgtgcttttgcagcctagatggaaacgagtcgtggggtggagcggaccagtgccaagaccccggcatggacaccgcgcagtggccatcaaagagctcatcgtagtgtttggaggaggcaacgaagggatcgtggacgagctgcacgtatataacaccgccaccaatcagtggtttatcccagcagtccgaggcgatatccctcccggatgtgccgcctatggcttcgtgtgcgacggtacccggttgctcgtgtttgggggaatggttgaatacggaaaatacagcaacgacttgtacgaactgcaggccagccggtgggaatggaagcgattgaaagcgaagacaccaaaaaatggccccccgccttgtccgagactgggacattcatttagtctggtcggcaataagtgctacctctttggtggattggctaacgacagtgaagaccccaaaaacaacatcccccggtacctcaatgacctttatatcctggagttgaggccggggtccggcgtggtggcctgggacattcctataacttacggtgtgctgccccctcctagggagtctcacacagctgtagtgtatacagaaaaggataacaagaagagtaagttggtcatctatgggggcatgtctggctgcagactgggcgacctgtggacactggacattgatacgctgacttggaataagccgtcactgagcggagtggctcccctgccacgctctctccactctgctacaacgatcgggaacaagatgtacgtatttgggggctgggtgcccttggtcatggatgatgtgaaggttgcgacgcatgagaaagagtggaaatgtaccaacacactggcctgcctgaacctcgataccatggcatgggagaccattctcatggatacgctggaagataatattcctagggcccgggctggtcactgtgccgtggccatcaatactcgcctgtacatctggagtgggagagatggatacaggaaggcatggaataatcaggtgtgctgcaaagatttgtggtacttggagacagagaagtaa

SEQ ID NO: 611 - DNA, 1965 bp, synthetic construct
  source 1..1965: mol_type = other DNA
ccccccgcccgcgtccagctggtaagggccaatacaaacagtctggaggtgagttggggggccgtagccaccgccgactcataccttctgcagcttcagaaatacgatattcccgcgaccgccgcaactgccacatctccaacaccaaatccagttccctccgttccggccaatccccctaaatctccagcacccgccgctgccgcccctgcagttcagcccctgacccaagtgggaattacactcttgcctcaggcagcacctgctccacccaccaccaccaccatccaagtgctgccaacagtgcccggatcatccatttctgtccccactgcagcccggacccagggggtgcccgcagtgctcaaggtgaccggcccccaggccaccactggtacaccgttggtcactatgaggcctgctagccaggccgggaaggcgccggtgaccgttacaagcttgcccgctggggtgaggatggtggtgcccactcaatcagctcagggaactgtcattggtagctccccccaaatgagcggcatggcagcgctggccgctgcagccgccgcaacccagaagatcccaccttccagtgctcctacggttttgtccgttccggccgggaccacaatcgtaaagacaatggccgtaactcccggtacaaccacccttcccgcgacggtgaaggtagcctcatccccggttatggtgagcaaccctgccacccgaatgctcaaaactgcagccgcccaggtcggcacatctgtttccagtgcgacaaacacgtctacgcggcctatcattactgtgcataagtccggaacagttaccgttgctcagcaagcgcaagtggtgactactgtggtaggcggagttactaagacaattacacttgttaagtctcccatcagtgtgcctggcggttcagcactgatctctaatctgggcaaagtgatgagcgtggttcagaccaagcccgtgcaaacatccgcagtcaccggccaggccagcaccgggcctgttactcagataatccagacaaaaggcccgttgcccgcgggtaccatccttaagctcgtaacctcagctgacgggaagccgacaaccatcattactaccactcaggcttctggggcaggcacgaaaccaaccatcctggggataagctccgtgtctccttctactactaaacccggcactacaaccatcattaaaaccatccccatgagtgccattatcactcaggccggcgctactggagtgacctctagcccaggcattaagtctcctatcacaatcattactacaaaagtcatgacatctggaactggggctccagccaagataatcaccgccgtgcctaaaatcgctaccggccacgggcagcagggcgtgactcaggtagttcttaaaggagccccagggcaacccggtaccatcttgagaaccgttcctatgggaggcgttcgacttgtgacacctgtgacagtgagcgcagtcaaaccggctgtgacaactctggtggtcaagggaacaactggcgtgacaacactgggcaccgtgacaggtacagtctccacttctttggcaggagcggggggccactccacatccgcctcattggcgacgccgatcacaactcttggcactattgccaccctgagttcccaagtaatcaatccgaccgccattaccgtgtcagcggcacagacaactttgactgcagctggtgggttgaccaccccgacaatcacaatgcaaccagtaagtcagcccacacaagttaccctcatcacggctccaagtggcgtggaggcccagcccgtccacgatctgcccgtctctatcctggcaagtcctactactgagcaaccaaccgcgaccgtgacaattgctgactcaggtcaaggtgatgtccagcctgggaccgtgacgctggtttgcagcaatccaccatgcgagtaa

SEQ ID NO: 612 - DNA, 1839 bp, synthetic construct
  source 1..1839: mol_type = other DNA
acccacgagaccggaactacccataccgccactacggtgacatccaatatgtcaagcaaccaggacccaccacctgcagccagcgatcagggggaagtcgagagcacccagggtgactccgtaaatataactagttcatcagctatcacaacaacagtgtccagcaccctgacccgcgcagtgacgacagtcacgcagtctaccccagtgcccggcccaagcgtgccccccccagaggagctccaagtatctcccggcccccgacagcaactccccccccgccagcttctccagagcgcgagcacagctctgatgggcgagagcgcagaggtgctgtctgccagccagacgcctgagctgcccgcagccgtggacctgtcttccactggagaacccagctctggacaggagagtgcggggagtgccgtggtagcaaccgtggttgttcagcccccaccacctactcagtccgaagttgaccagctttccctgccccaagagctgatggctgaggcacaagctgggaccaccactctgatggtgactggtctgactcctgaggagttggccgtgacggctgctgcagaggccgccgcccaggccgccgctacagaagaggctcaggccctcgctatccaggctgtcctgcaggccgctcagcaggccgttatgggtaccggagaacctatggatactagcgaagctgccgcaaccgtcacacaagctgaacttgggcatctctccgcggagggacaggaaggtcaagcaaccacaattccaatcgttctcacccagcaggaactcgctgccctggttcagcagcaacaacttcaggaagcccaggctcagcagcaacaccatcacctccccacagaggctttggcccccgccgacagcctgaacgacccagcaatcgaaagtaattgtttgaacgaattggctggcacagtgccatccacagttgctttgctgccctctactgccaccgaatccctggcccctagtaacacgttcgttgcacctcaacctgtggtggtcgcgagtcctgccaagttgcaggccgccgctacacttacggaagtcgccaacggaatcgagtctctcggggtcaagccagacctgccaccccctccatccaaagctccgatgaagaaggaaaaccagtggtttgacgtgggtgtgatcaagggcacgaacgtgatggtgacccactattttctgcctcccgatgatgccgtgccgtcagatgatgacctcggaactgtgcctgactacaaccagttgaagaaacaagagctgcagcccggcacagcttacaagtttcgggtggccggtattaatgcttgtggccgcgggccattttctgagatttccgcctttaagacgtgtctgcccggtttccccggggcaccttgtgccatcaagatcagcaaaagtccggacggtgcccacctcacatgggagccaccaagcgtaacctccggaaagatcatcgaatatagcgtgtacctggcaattcaaagtagtcaagctgggggagagctgaagagttcaactcctgctcagcttgcctttatgagggtatattgtgggccaagtccgtcctgtttggtgcaaagttcttccctgtccaacgcacatatcgattacactaccaaacccgctattatcttccgaattgcggcaagaaacgagaaaggatatggccctgctactcaggtcagatggctgcaggagacttctaaggactcctctggaactaaacccgctaacaagcggcctatgtcttcccccgagatgaagtctgcacctaaaaagagtaaggctgatggccagtaa

SEQ ID NO: 613 - DNA, 1617 bp, synthetic construct
  source 1..1617: mol_type = other DNA
atgaatctggagctcctcgaatcatttggtcagaactatcccgaagaggctgatggcacgctcgactgcatcagcatggcgctcacctgcaccttcaataggtgggggacactcctcgctgtaggctgcaacgacggcagaatcgtaatctgggatttcctgacacgcggcattgctaagataataagcgcccatatccatccagtctgctcactttgctggtctcgggacggtcacaagttggtaagcgcttccaccgataacattgtttctcagtgggacgtgctcagtggggactgcgaccagaggttccgcttccctagccccattctcaaggtccaataccaccctagagatcagaacaaagtgctcgtctgtccaatgaagagcgcgcccgtcatgttgaccctgtctgactcaaagcacgttgttcttcccgtagatgacgacagcgacttgaatgtcgtggccagcttcgatcggaggggcgaatacatttatacaggcaacgctaaaggcaaaatcctcgtactgaaaacagacagccaggatttggttgccagctttcgggttactaccggcacttccaacaccacggccattaaaagcatcgagtttgcaaggaaaggatcatgtttcctcatcaatacagccgataggattattagggtctacgatggcagagagatccttacctgcgggcgggatggagaaccagaacctatgcagaaactgcaggaccttgtgaaccgcaccccctggaaaaagtgttgcttctcaggtgatggcgagtacatagttgcaggctcagcacgacaacacgctctctacatttgggaaaagagtataggaaaccttgtgaaaatcctgcatggaactcgcggcgagctgctcctcgacgtcgcctggcaccctgtgcgaccaatcatcgcctctattagtagtggggtggtttcaatttgggcacagaaccaggttgagaattggagcgccttcgctcctgactttaaagagctggatgagaacgtcgagtacgaggaacgggaatcagagttcgacattgaagacgaggataagtccgagccagagcagaccggcgccgatgccgcagaggatgaagaagtcgacgtgacaagcgttgatcccattgctgctttctgttccagtgatgaagaactcgaagactccaaggccctcctgtacctgcccattgcacccgaggtggaggaccccgaggagaacccttacggacccccccctgacgcagtgcagacctcactcatggacgaaggcgcctcaagcgaaaaaaagaggcagtcatccgccgatggctctcagccccccaaaaagaagccaaaaactacaaacatagagctccaaggcgtgcccaacgacgaagtgcatcccctgcttggagtaaagggagatgggaaatcaaagaagaagcaggcaggccggcccaaaggatccaagggaaaggagaaggacagtccattcaagcctaaactgtataaaggtgatcgcgggctgccgttggagggatcagccaaaggaaaggtgcaggccgaactgtcacagcctctgactgccggcggagccatcagcgagttgctgtaa

SEQ ID NO: 614 - DNA, 1848 bp, synthetic construct
  source 1..1848: mol_type = other DNA
atgggcctgaaggccgcccagaaaacattgttccctttgaggtcaatagatgatgtcgtcagattgtttgccgccgagctggggagagaggaacccgatctcgtgttgctgtctttggtgcttggctttgtggaacactttcttgccgtgaaccgcgtgatccccaccaacgtgccagaacttacctttcagcctagtcccgcaccggacccaccaggggggttgacatactttcctgtcgcagacctgtctataattgcggccctgtatgccagatttacagctcaaatccgcggcgccgtggacctgtctttgtacccccgcgagggtggggtttccagcagagaactcgtgaagaaagtctcagacgtgatctggaattctcttagtcgaagctattttaaggacagggctcacatccagtcactgttttcatttattacgggctggtctcccgttggcactaaactggactcctccggagttgcgttcgctgtcgtgggagcctgtcaggcacttggattgagggacgtccatcttgccctgtcagaagaccacgcgtgggtcgtgtttggcccaaacggcgagcaaactgcggaggttacctggcatggcaagggtaatgaggacagacgcgggcagacggtcaacgctggggttgctgagaggtcctggttgtacttgaagggctcttatatgaggtgcgacaggaagatggaggtcgcattcatggtgtgtgcaataaatcccagtatcgaccttcacacagatagtctcgaactgcttcagcttcaacaaaagttgctttggcttctgtacgatctcggtcacctggagcggtaccccatggctcttggcaacctggcggacctcgaggagttggagccaactcccggccgaccagaccctctgaccctgtaccataagggcatcgcatccgccaaaacctattaccgcgacgagcatatctacccttacatgtatttggcggggtatcattgtcgcaataggaacgtccgggaggccctgcaagcctgggctgatactgcaaccgttatacaggactataactactgccgagaggatgaggaaatttataaagaatttttcgaggtggcaaacgatgtgatccccaacctccttaaagaggccgcttcactgctggaggcaggagaagagcggcccggtgagcagtctcaggggacgcagtctcagggcagcgctctgcaggaccccgaatgtttcgcccacctcctcagattttacgacggcatatgcaagtgggaggaggggagccctacccccgtcctccatgtggggtgggccacattcctggtacagagcctgggccgcttcgagggtcaggttcggcaaaaagtgagaatcgtgtcccgggaagccgaggccgccgaagctgaggaaccttggggggaagaagcgcgggagggccggagacgcgggccacgcagagaatccaaacccgaggaacccccacctcctaagaagccagcgttggataagggactgggcacgggccaaggggctgtgtccggtccccctaggaagcctcctgggacggtggctgggacagccagagggcccgagggaggtagtactgcacaggtcccagcgccaacagcgagccctccacccgagggtcccgtgctgaccttccagtcagagaagatgaaagggatgaaggagttgctggtggcgacgaagatcaactcttccgcaatcaaactgcagctcaccgcccagagccaggtccaaatgaagaagcaaaaggtgtccaccccatctgattacaccctgtccttcctgaagcgccagaggaaaggattgtaa

SEQ ID NO: 615 - DNA, 1326 bp, synthetic construct
  source 1..1326: mol_type = other DNA
atgagcgaacgagaagtatccactgcccctgccggcacagatatgcctgcagcaaagaagcagaaactgagctccgacgagaattctaacccagacctgtctggcgacgagaacgacgacgccgtgtctatcgagagcggcacaaataccgagaggcctgatacaccaactaataccccaaacgcccctggccgcaagtcctggggcaaggggaaatggaagagcaagaaatgtaagtactccttcaagtgcgttaactctctgaaggaagatcacaaccaacccctctttggcgtgcagtttaattggcatagtaaggaaggtgaccctttggtctttgctacagtcggcagcaatcgcgtgacgctttatgaatgccacagccagggtgaaattcggctgctgcaaagctacgtcgacgccgacgccgacgaaaatttttacacatgcgcctggacctacgatagcaatacctcacacccactccttgctgtggctggaagccgaggcatcataaggatcatcaatcccatcacaatgcaatgtatcaaacactacgtcggtcacggcaatgctattaacgagctgaagttccatccccgcgatccaaaccttttgctgagtgtaagtaaagaccatgcgctgaggctttggaatattcaaaccgacactctcgttgccatttttggtggtgtggagggccatcgggacgaggtgctcagcgctgattacgatctgctcggagagaagattatgtcctgtggaatggatcatagtttgaaactgtggaggatcaatagtaagcgcatgatgaacgccatcaaggaatcatacgactacaaccctaacaaaactaacaggcccttcatttcacagaaaatccatttcccagactttagtactagggatattcaccgcaactacgttgactgtgtgcgatggctcggcgatctgatcctctcaaagtcctgcgaaaatgctatagtttgttggaagccaggcaagatggaggacgacattgacaaaatcaagccctccgagagcaatgtgaccattttgggccgctttgactattcccaatgcgatatttggtacatgaggttctctatggatttttggcagaagatgctggccctggggaatcaagtagggaaactgtacgtctgggaccttgaggtcgaggatccccacaaggccaagtgtacaaccctgactcatcacaagtgcggcgctgcaatccggcaaacaagtttttcacgggactcaagcatcctcattgccgtgtgcgatgacgctagcatctggcggtgggatcgactccggtaa

SEQ ID NO: 616 - DNA, 2559 bp, synthetic construct
  source 1..2559: mol_type = other DNA
atgctgtccggcaagaaggctgctgctgccgcggccgcagctgctgcagcagccaccggtactgaggcaggtcctggcaccgcaggcggatccgagaacggatccgaggtcgcagcccagccggcgggactgagcggaccagctgaggtggggcctggagctgtgggggaacgaaccccgaggaagaaggagccgcctagagcaagcccaccgggcgggcttgcagagcccccagggagtgcgggccctcaggcaggtcctactgtggttcccgggtccgccacccctatggagacaggaatcgcagaaacccccgaaggtcggcggaccagtagaaggaaacgagcgaaagtggagtacagggaaatggatgaaagtctggccaatctttccgaggatgaatattactctgaggaggagcggaacgctaaggctgagaaggagaagaagctgccaccaccacccccacaagccccaccagaggaagaaaacgagtctgagcctgaggagccatccggagtcgagggggcagcatttcagtcccggctgccccacgacaggatgacttctcaggaggcagcatgcttcccggatatcatttctggcccacagcagacgcaaaaggtatttctctttattagaaaccgcactcttcaattgtggctggataaccccaagattcagcttacctttgaggcaacgcttcagcagttggaggccccttataattccgacaccgttctggtacacagggtgcactcttacttggagagacacgggctgattaacttcggcatttataagagaattaaaccgttgcctactaagaagacaggaaaggtgattattattggatcaggggtgtcagggctggctgccgcccgccagcttcaatcctttggaatggacgtgactctgcttgaggcccgcgatagagttggcggaagggtagctacgtttaggaagggtaattacgtggctgacctcggggctatggtggttactggtcttggggggaaccccatggccgtggtgtccaagcaggtcaatatggagctcgccaaaatcaaacagaagtgtcccctgtacgaagccaacggccaggccgttccgaaagagaaagatgagatggtagagcaggaatttaacagactgctcgaagccaccagctatctgtcacaccagctggattttaatgtccttaataataagcccgtctcactcgggcaggcgctcgaggtcgtgatacagttgcaggagaagcacgtcaaggatgagcagatcgaacactggaagaagattgtgaaaacccaggaggagctgaaagaactgctgaacaaaatggtcaatcttaaggagaagattaaagagctccaccagcagtacaaagaggccagcgaggtgaagccacccagggacattacagctgagtttctggtgaaatccaaacaccgggatctgacagccttgtgcaaggaatacgacgaattggctgagacacagggaaaactggaggaaaaacttcaagagttggaggctaatcctccctcagacgtgtacctgtcttcccgggacaggcaaattctggactggcacttcgcaaatctggagtttgccaacgcaaccccgctgagcaccctcagtttgaaacattgggatcaggacgatgactttgagttcacaggctcacacttgaccgtccgaaacggctattcctgcgttccagtcgctttggcagaaggtctcgacataaaacttaatacagctgtgcggcaggtgaggtacactgcatccgggtgcgaggtgattgcagtaaatactaggtccactagtcagactttcatctacaagtgtgacgccgtgctctgtaccttgccattgggcgttctgaaacagcagccccctgccgtgcagttcgtcccacccttgccagagtggaaaacctccgcagtacaaagaatggggttcggaaatttgaacaaagtggtgttgtgctttgaccgggtcttttgggacccgagcgtgaatctgttcgggcacgtgggatccacaactgcatctcggggcgaactttttctgttttggaacctttacaaggctcccatcctcttggcccttgttgctggggaggcggccggaataatggagaacataagcgatgatgtaatcgtgggccgatgcttggccattttgaagggaattttcggttcatctgccgtgccccagcctaaagagacggtcgtatctcggtggcgcgctgacccctgggcgcggggcagctactcttacgttgccgctggttcaagcgggaacgactacgatcttatggcccagcccattacccccggtccaagcatcccgggcgctccccagcctatcccacgcctgttttttgccggcgaacatacaatccgaaattacccagccacggtgcacggtgccctcttgagtgggcttagggaggctggacggattgcagatcagttcctcggagctatgtacactctgccacgccaggccactcctggcgtccctgcacaacagtcaccgagcatgtaa

SEQ ID NO: 617 - DNA, 162 bp, synthetic construct
  source 1..162: mol_type = other DNA
cccgctgcagctgccatccagagacactataatgatgaggaccctgagaaggaaaaaaggataaaggagctcgagctcctccttatgagcacggaaaatgagctcaaaggccaacaggtcttgcctacccagaatcacacctgttcctatcctggttggtaa

SEQ ID NO: 618 - DNA, 1902 bp, synthetic construct
  source 1..1902: mol_type = other DNA
caatttaaccctgaggaacttagaaccgcgctgctcccgaccctggagaagctctatagacaggaacctgagtctgtgccattcagatacccagtggacccacaggctctggggattcctgactatttcgaaatcgtgaagaaacccatggatctcggtactatcagaaccaatatccagaacgggaaatatagtgacccctgggagtatgttgatgatgtgtggctcatgttcgataacgcatggttgtacaatagaaaaacatcaagggtttacaggtactgcaccaagctgtcagaggtgtttgaggccgagatcgacccagttatgcaggctttgggatactgctgcgggcggaaatatacattcaatccgcaagtgctgtgctgctacggtaagcagttgtgtaccatcccacgggatgcgaagtattactcttatcagaactctctgaaagagtacggagtggcctctaacagatacacttattgccaaaaatgcttcaatgacatccaaggggacacagtcactctcggtgatgaccccttgcaatcacagactcagatcaagaaggaccagtttaaagaaatgaaaaacgatcacctggaactcgagccattcgtgaactgtcaggagtgcgggagaaaacagcatcaaatctgcgtcctgtggctggattccatatggccagggggattcgtgtgtgataattgcttgaagaagaaaaactccaagagaaaggaaaataagttcaacgccaagcgacttcccaccactaagttgggagtgtacatcgagactagagtgaacaatttccttaaaaaaaaggaagctggcgccggggaggtccacattcgagttgtgtcctcatcagacaaatgcgttgaggtcaaacccggcatgcgacgacggttcgtcgaacagggcgagatgatgaacgagttcccttatcgcgccaaggcactgtttgccttcgaggaggttgatgggattgacgtgtgctttttcggcatgcatgtgcaggaatatggcagtgagtgccctgctcccaacactagacgggtgtatatcgcctatttggactctgttcacttcttcaggccccgccagtataggacagccgtgtaccatgagatcctccttggctatatggattacgtgaaacagctgggttataccatggcgcacatatgggcatgccccccgtccgagggcgatgactatattttccattgccatcctactgatcagaagatccccaagccaaaacggcttcaggagtggtataagaagatgctcgacaaagggatgattgaaagaatcatccaggactacaaggatattctcaaacaggcaatggaggacaagctgggatccgccgccgagttgccttatttcgaaggagatttttggcccaacgtgctcgaggaatcaattaaggaactggatcaggaagaagaagagaagagaaaacaggccgaggccgccgaagcagctgcagccgctaatttgttttccattgaggagaacgaagtatctggtgatgggaaaaagaaaggccagaaaaaggccaaaaagtccaataaaagcaaagccgctcagaggaaaaactccaagaagagtaatgagcaccagtccgggaacgaccttagtactaagatttacgcaaccatggaaaaacataaagaggtctttttcgtgatcagactgcatagcgctcaatcagcggcttcattggctccaatacaagatcccgacccactgctgacctgcgatctgatggacggccgggatgcatttctgaccctcgcaagggacaagcatttcgagtttagcagtctgcgaagagctcagttttctactctgagtatgttgtatgagttgcacaaccaaggccagtaa

SEQ ID NO: 619 - DNA, 2655 bp, synthetic construct
  source 1..2655: mol_type = other DNA
ggcgcgggagcaatcgttcctgtgactccggtgaaaaaacctaggccccggcccaaggtggatctggacgacgaaaccgaccgcgtttggaagctgcttctggagaatattaattcagaaggagtcgacggctccgacgagcagaaagctaaatggtgggaggaggagcgaaatgtgttccgaggcagagcagactcattcatcgcgcggatgcatctcgtacaaggggataggcggttcactccatggaagggctcagtagttgatagtgttgtgggcgtgtttctgactcagaacgtatcagatcatttgtcctcttcagctttcatgtctctggcaagccaatttccagtcccattcgtgccctcttccaactttgatgccggcacttctagtatgccaagcatccaaataacatatctggactctgaggagaccatgtccagtccgcccgatcataaccactcatcagtgacgctgaagaacacacagccggacgaggagaaagattacgtgccaagcaacgagacttccagaagctccagtgaaatcgcgataagcgctcacgaatctgttgacaaaacaacggacagtaaagagtacgtggactccgatcggaaagggtcaagtgtcgaggtggacaagaccgacgagaagtgccgcgttctgaatctgttcccaagtgaggactcagctctgacctgccagcacagcatggttagcgatgccccacaaaatactgagagggcaggatcctcctccgagattgacttggagggcgagtatagaacatccttcatgaagcttcttcagggagtccaggttagcttggaggacagtaatcaggtgagtcctaacatgtctccaggtgactgttcctcagagataaaaggctttcaatctatgaaagagcctacgaaatcatccgtggactcaagtgagccaggctgttgctcccagcaggacggagatgttctgagttgccagaagccgacactgaaggagaaaggcaagaaagttctgaaggaggaaaagaaggcatttgattgggattgcctgagaagagaggcccaagccagagctgggatacgcgagaagacacggagcacgatggataccgtggactggaaagcgatccgggccgcggatgtcaaagaagtggctgaaacaataaaatcccgcggcatgaatcacaaactggctgagcgcattcagggttttctcgacagacttgtaaatgaccacggatccattgatctcgagtggttgcgagatgtccctccagataaggccaaggagtatttgctgagttttaatggccttggcctcaaatccgtggaatgcgttcgcttgctgaccctccatcacctggccttccctgtcgacaccaacgttggcagaatcgccgtgcgcctggggtgggtcccactgcagcctctgcctgagagcttgcaattgcaccttttggagatgtatccgatgctggaaagtatccagaaatatttgtggccccgcctctgtaagctggatcagaaaacgctctatgagctgcattaccaaatgattacttttgggaaggtcttttgtaccaagagtaagcctaattgcaatgcttgtccaatgaaaggggagtgccggcactttgcatccgcctttgctagcgccaggcttgctcttccgtccacagaaaagggcatgggtacccccgacaaaaaccctctccctctccacctgccagagccatttcaacgagagcagggtagtgaggtagtccagcacagtgaacccgctaagaaggtgacttgttgcgaacccattattgaagagcctgcatcaccggagccagagacagccgaagtctcaattgctgatatagaggaagctttcttcgaagatcctgaagagataccaactatcaggctgaatatggacgcattcacttcaaatctcaagaaaattatggagcataacaaagagctgcaggatggaaatatgagcagcgccctggttgccctgactgctgaaaccgccagtctccccatgcctaagctgaagaatatcagccagctgcggactgaacatcgcgtctatgagctcccggatgagcatccgctgctcgcacagctggaaaagcgggagcctgatgatccatgctcttatctgctcgctatttggaccccgggcgagactgctgattctatccagcccagcgtttcaacctgcatctttcaggccaacggcatgctctgcgatgaagagacttgcttttcatgcaactcaataaaggagacccgctctcagattgtgcggggcacaattctcattccatgtcgcactgcaatgcgcggatcctttcccctgaacggcacctacttccaggttaacgaggtctttgcagaccatgcctctagcctgaaccccataaacgtacctcgagagctcatctgggagctcccacgaaggacagtgtatttcggaacctcagtgccaactatattcaagggactgtccacagagaaaatccaggcttgtttctggaagggatatgtttgcgtccgagggttcgacagaaaaacacgaggtcccaaaccgctgatcgccaggctgcacttccctgccagcaagctcaaaggacagcaggctaaccttgcataa

SEQ ID NO: 620 - DNA, 2694 bp, synthetic construct
  source 1..2694: mol_type = other DNA
caaagcactgtaaagatccccacaaggtttagcaacagacagaataaaactgtgaactacaatatcgactattccgatgacgatctcctcgagagtgaggatgactacgggtcagaggaggcgctttctgaagagaacgttcacgaagcctccgccaacccccagccagaggattttcacgggattgacatagtgataaatcaccggctcaaaactagcctggaggagggcaaggttctggagaagaccgtgcctgatttgaataattgtaaggagaattacgaatttctgatcaagtggacagatgaaagccatctccacaatacctgggagacatatgagagcattggtcaggtccggggactcaaaaggctggataattattgtaagcagttcatcatcgaggatcaacaggtgagactggacccttacgtgaccgccgaggatatagagatcatggacatggaaagggagcgaaggctggatgaatttgaggagtttcatgtgcctgagcggattatagattctcagagagcctccctcgaggacgggacatcccagctgcagtatctggtgaaatggaggagactgaactatgatgaagccacttgggagaacgcaacagatatcgttaaactcgctcccgagcaggtcaagcacttccagaatcgcgagaatagcaagatcctgcctcagtactcctcaaattatacaagccagaggccgcggttcgagaagctttcagtgcaaccgccgttcattaaaggcggagaactgcgggatttccagctgaccgggataaattggatggccttcctgtggtccaagggtgataacggcatattggctgatgagatgggccttgggaaaactgtgcagaccgtggcatttatcagttggctgatattcgcgaggcggcagaatggacctcatattatcgtggtacccctcagtactatgcccgcctggctcgacacatttgaaaaatgggcgcctgatctcaactgtatctgttatatgggaaatcaaaaatcaagggataccatcagagaatatgagttttacaccaatcctcgagccaaaggaaaaaaaactatgaagtttaatgtccttctgaccacttatgagtatattctgaaggacagagctgagctcggttcaattaagtggcaatttatggccgtcgatgaggcccaccgattgaagaatgccgagtcttctctctacgagagcctgaacagctttaaagtagccaatagaatgctgatcaccggtactcccctgcagaataatataaaggaactggcggctctcgtgaacttcctgatgccagggaggttcacgatcgaccaagaaattgacttcgagaatcaagacgaagaacaggaagaatacattcatgacttgcaccggaggatacaaccgttcattctgaggcgactcaaaaaggacgtcgagaaaagtctcccctccaagactgagaggatcttgcgagtcgagctgtctgacgtccagacggagtactacaagaatattctgacaaaaaactactcagccctcaccgccggggcaaaaggaggacactttagcttgctgaacatcatgaacgagctcaagaaagccagcaatcatccatatctctttgacaacgctgaggaaagagtactccaaaaatttggcgatggcaagatgactcgagagaatgtcctccgaggattgatcatgagcagcggcaagatggtcctgctggaccaactgctcactcgccttaagaaggacggacatagagtgctgatcttctcccagatggtgcggatgctggacattctcggcgactatttgtctattaaaggaattaacttccagcgcctggacggcacggtcccctccgcgcagcgcagaatctcaatcgatcattttaacagtcctgattccaacgactttgtatttctgctgagtacacgggcaggaggcttggggataaacctcatgacggctgatacggtcgtgatttttgatagtgactggaacccacaggcagatcttcaggccatggccagggctcaccggattgggcagaaaaatcatgttatggtttacaggctcgtgagcaaagacactgtcgaggaagaggttctcgagcgcgctcgaaaaaaaatgattttggaatacgctataatcagcctcggggtaactgacgggaataagtacacaaaaaagaacgagccgaatgcaggggaactttctgccatcttgaagttcggtgccggcaatatgtttacagctaccgacaatcagaaaaaactggaagacttgaacctcgacgatgtactcaaccatgcagaggaccatgtcacaacgccagatttgggggagtctcatttgggcggggaagaattcctgaaacaattcgaggtgaccgattataaagctgacatcgactgggacgatataatacccgaagaggaacttaagaaactgcaggatgaggagcagaagcgcaaagacgaagaatacgtgaaagaacaactcgagatgatgaaccgcagagacaacgctcttaagaagattaaaaattcagtaaacggggacggaacagctgccaactcagactcagatgacgattccacctctcgatccagccggagacgggcacgagcgaacgacatggattcaatcggagagagcgaataa

SEQ ID NO: 621 - DNA, 2283 bp, synthetic construct
  source 1..2283: mol_type = other DNA
atggggaccggcaaaaggagcgataaaggacctgcctgctggaagcggagagtgaagtcagagtacatgaggttgcggcaaatgaagcggttccggcgggccgatgaagtgaaagggatgttcaactctaataggcagaagatcatggagcgcacagacattcttaaccaggaatggaagacgcgcaggatacagccaatacacatcatgacccctgtgtctagccggggtactagggaatgcaccgtagatagcggtttccccgaatttagccgacaggtgattcccctgaagaccttgaacgccgtagcaagcgtgccagtgatgtattcttggagcccgctccaacagaactttatggtcgaagacgaaaccgtcctgcataacatcccctatatgggagatgaaatcctggatcaggatggtacctttatcgaggaactgattaagaattacgacggcaaagtccacggcgatagagagtgcggttttataaatgacgaaatttttgtggagctcgtaaacgcccttgtgcagtatagtgataacgaggatgacgaagaggatgaagagcaggactacaaggtggacaaaatggacctgtgtgatggaaaagaccacactgaagatccatgtaaggacggacattccaatgagtctcgggccaacagtgacggtagcaaaaagttcccttccgataagatctttgaggctattagcagcatgtttcccgacaaaggttccctggaggagctcaaggaaaagtacaaggaattgactgagcagcaattgcccggggctctgccacccgagtgcactccaaatatagacgggccaaatgcaaggtccgtacagcgcgagcagagtttgcacagttttcatactttgttctgccgaaggtgttttaaatatgattgttttctccatccttttcacgcaacgcccaatacttataaaagaaaaaacctggagaatcttgtggaatcaaaaccttgtggtatcgactgctacatgtatcttgtgcaagatgggatgtttagagaattcccagcaggagtggtcgccgagcgggccaaaactccctcaaaacgcagcgtgggccgcaggagaggtcgacagccaaacagtaattcctcatcacggccttccacccccacgataagcagcgaaacaaaggacgccgatagcgaccgagaggacggaaaggaggacgagcgcgacaacgataaagatgatgaagacaagaaagatgagaccacaagctcatctgagggtaactccaggtgtcagacaccagtgaagatgaagctgacaggcgaagctgaggccgtggagtggtctggggccgaggcgtcactctttcgagtgctgatagggacatattacgacaatttcctcgccatcgccagactgattggaacaaaaacttgtcgccaggtctacgagtttcgggtgaaagagtctgctattattgcacgagcacctgctgaggatgaagatacaccgcccaggaagaaaaagagaaagcacagactgtgggccacacactgccggaaaatccagctcaaaaaagacgggagctccaaccacgtgtataactatcagccatgtgaccatccaagacagccatgcgattcctcatgcccctgtgtaacggctcagaacttctgcgagaaattctgccagtgtagcagtgaatgccagaacaggttccctggatgccgatgcaaggcccagtgcaatacaaagcagtgtccatgttacttggcagtgcgcgaatgtgacccagatctctgtctgacatgcggggccgccgaccattgggattctaaaaatgtgtcatgcaagaattgctcaatccaacgcggagccaaaaagcacctcctcttggcaccatctgacgttgccggatgggggattttcattaaggagccagtccaaaagaatgagttcattagcgaatactgcggtgaaattataagccaggacgaggccgataggcgggggaaggtctatgacaagtacatgtgcagctttctgttcaacctcaataacgattttgtcgtggacgcgacccggaaaggaaataagatcagattcgctaaccatagcgtgaaccctaactgctacgccaaagtgatgatggtgagtggggaccacagaatcgggattttcgcaaagagagctatacagactggtgaggagctgttctttgactaccggtatagtcaagctgacgccctgaagtacgttgggattgagagggaaatggagattgcataa

SEQ ID NO: 622 - DNA, 2241 bp, synthetic construct
  source 1..2241: mol_type = other DNA
atgggccaaaccgggaagaaatcagagaaaggacctgtctgctggaggaagcgggtgaaaagcgaatatatgcggctgcgccagttgaaaaggtttcggagggcggatgaggttaaatccatgttctcatccaacagacaaaaaattcttgagcggacagagattctgaatcaggagtggaagcagcggcggatccagccagtgcatattctgacgagcgtgtccagcctcagaggaactcgcgagtgtagtgtcacctccgatctggactttccgactcaggtgataccactcaagacactgaatgcggttgcctcagtccccatcatgtattcttggagtccactccaacaaaactttatggtggaagatgagacggtcctgcacaacattccatatatgggcgacgaagtgctcgatcaggacggcacattcattgaggaattgatcaagaattacgatgggaaagtacacggagacagagaatgcggattcattaacgacgagatctttgtggaattggttaacgcactgggacagtacaacgacgacgatgacgatgacgacggggatgaccccgaggaacgagaggaaaaacagaaagacctggaggatcaccgcgacgacaaagagtcccgaccccctcgaaagtttccatccgacaaaatctttgaagccatctcctcaatgtttcctgacaaagggaccgccgaagaactgaaagaaaaatacaaagaactcaccgagcagcaattgccaggcgccctccctccggaatgcacacccaacatcgatggcccaaatgcaaaaagcgtccaacgagaacaatccctgcactcttttcacaccctcttctgccgcaggtgttttaagtatgattgtttcttgcacccattccacgcaacgcccaatacttataagcggaagaatactgaaaccgcactggataataagccgtgcggtccgcagtgttatcagcacctggagggcgctaaagagtttgctgccgccttgactgctgagaggatcaagactccgccaaagcggcctgggggccgccgacggggacgcctgccaaacaatagtagtcggccatccacccccactattaacgtgctcgagtccaaggacacagactccgatagagaggcaggtacagagacagggggcgaaaacaacgacaaagaagaagaggagaagaaggacgagactagttcaagtagtgaggcaaactcccgatgccaaacgcctataaagatgaaacctaacatcgagccacctgaaaatgtcgaatggagcggagctgaggcttccatgttcagggtgctgattggaacctactacgacaacttttgcgcaattgctagactcatagggacaaaaacatgcaggcaagtatacgagttccgcgtgaaagagagcagtataattgcccccgcacctgccgaggatgtggacacaccaccaaggaaaaagaagcggaaacataggctgtgggcggcccactgcaggaagatccagctgaagaaagatgggagcagtaatcacgtgtacaactaccaaccatgtgatcatccaaggcagccatgcgattcctcttgtccatgtgtgattgcacagaatttctgcgaaaagttctgtcagtgctctagtgagtgccaaaacaggttccccggttgccgctgcaaagcccaatgtaacacgaagcagtgtccctgctacctggctgtgcgagaatgcgaccccgacctctgcctcacctgtggagcagcggatcactgggacagtaagaatgtcagctgtaagaactgtagcatccagcggggtagtaaaaagcatctgcttctcgccccgtcagacgtggcaggttgggggatcttcattaaggaccccgtgcagaagaatgagtttatttccgagtactgtggcgaaatcattagccaggacgaagcagatcgcagaggcaaagtctacgataaatacatgtgcagcttcctcttcaacctcaacaatgacttcgtggtggacgccacgaggaagggcaataaaatacggtttgccaaccatagtgttaatccaaactgttacgcaaaagtcatgatggttaacggagaccaccgcatcggaatcttcgccaaaagggccatacagaccggggaagaactcttcttcgattaccgctattcccaggccgatgccctcaagtacgttggtatcgagcgcgaaatggagattccctaa

SEQ ID NO: 623 - DNA, 1134 bp, synthetic construct
  source 1..1134: mol_type = other DNA
atggaagaacctgaagaacccgcggactccggacagtcacttgtgcctgtctacatttattcaccagaatacgtgtccatgtgtgactctcttgcgaaaattccaaagcgggccagtatggtccacagcttgattgaggcctacgctcttcataagcagatgcggattgtcaagcctaaggtcgctagcatggaggagatggcgacatttcacacagacgcctatctccagcatcttcagaaggtatcccaagaaggcgatgatgaccaccccgatagcatcgagtacggactggggtatgattgccccgcaactgagggcatattcgattacgctgccgccatcggcggcgcaacaattacagccgcccagtgcttgatcgacggtatgtgtaaggtggccatcaactggtcaggcggatggcaccacgcaaagaaggacgaagcatccggattttgctacctgaacgacgccgtattgggtatcctccggcttagacggaaattcgagaggatactgtatgtcgaccttgatttgcatcacggcgacggagttgaagacgctttttccttcacctccaaggtgatgacagtcagtttgcacaagttttcccctgggttcttccccgggaccggcgatgtcagtgacgttggtctgggcaagggccgctattatagtgtcaatgtgccgattcaggacgggattcaagatgagaagtactaccagatatgcgaatccgtcctgaaggaggtgtatcaagccttcaacccaaaggccgtggtactgcaactgggggctgacacgatagccggagacccgatgtgtagttttaacatgacccctgtcggaatcggaaagtgcctgaagtacatcctgcagtggcagttggccacgctcattttggggggtggcggctacaacctggccaatacagccagatgttggacctatctcactggcgtcatcctggggaaaacactgtccagcgaaattcctgaccatgaattctttacagcatatgggccagactacgtgctggagattacacccagctgtaggcctgaccgaaacgagccccaccgcatccagcagatcctgaactatatcaaaggcaatcttaagcacgtggtataa

SEQ ID NO: 624 - DNA, 876 bp, synthetic construct
  source 1..876: mol_type = other DNA
atggaggagggacctcttccaggcggactcccctctcccgaagacgccatggtgaccgaattgctgagccctgagggaccattcgcaagcgagaatatcgggctgaaagcccctgtgaaatacgaggaggacgaatttcatgtgtttaaggaggcctacctcgggcctgctgatcccaaggagcctgtcctccacgcctttaatccagccctcggagcggactgcaagggccaggtaaaggcaaagcttgctggcggagattcagatgggggtgagctcctcggggagtacccaggtatccccgagctgagcgctctggaagatgtggcactgttgcaggcaccccagccccctgcctgtaacgtgcacttcttgagctctctgcttcctgcacaccgaagcccagctgtgttgccccttggcgcctgggtcttggagggcgcctcacacccgggggtgcggatgataccagtggagattaaggaagccgggggtactactaccagcaacaacccagaggaagcgacattgcagaaccttctggcgcaggaatcttgctgtaaatttccatcatcacaggagctcgaagatgcctcttgttgcagtctgaagaaagacagcaaccctatggtcatctgtcagctgaaggggggcacgcaaatgctgtgtatcgacaacagccggaccagggaactgaaggccctgcatctcgtgccccagtatcaggaccagaacaattacctccagtccgatgttccaaagccaatgactgctttggtggggaggtttctgccagcatcaactaaactgaatcttattactcagcagctggaaggtgccctgcctagcgtggtgaatggctccgcgttcccttaa

SEQ ID NO: 625 - DNA, 2241 bp, synthetic construct
  source 1..2241: mol_type = other DNA
atgggacagactgggaagaagtctgagaaaggaccggtctgctggaggaaacgagtcaagtccgaatacatgcgcctgagacagctcaaaaggtttcggcgggcggacgaggtcaaaactatgttctccagcaatcgacaaaaaatcttggagcgcaccgagacactgaaccaagagtggaagcagaggaggattcagccggtgcacatcatgacttccgttagtagtcttcgcggcaccagggagtgttctgtgactagtgaccttgattttccggcccaggtaattccgctgaaaacactgaacgccgtcgcgagtgttcccatcatgtattcatggagccctctgcagcaaaactttatggtggaggatgaaactgtcctgcacaatatcccctatatgggcgatgaagtgttggatcaagacggcacttttattgaggagctgatcaaaaactatgacggcaaggtccacggcgacagggagtgcggttttattaatgacgagattttcgtcgaactggtgaacgctctgggacaatacaacgatgacgacgacgacgatgacggagatgatcccgacgaaagggaggagaagcagaaggacctggaagacaaccgggacgacaaggagacctgccccccacgaaagtttcccgccgataaaatttttgaggcaatctcctccatgttcccagacaaaggcactgctgaggaactgaaggaaaaatataaggagctgacggagcagcagcttccgggagccctcccacccgagtgcaccccaaatattgatggccctaacgccaagtccgttcagagggagcaatccctgcacagcttccacaccctgttctgcaggagatgctttaaatacgactgctttctccacccatttcacgcaacacctaatacctacaaacgcaaaaacactgagaccgccctcgacaataagccctgtgggccacagtgctaccagcatctcgagggagcaaaggagtttgctgctgctctcaccgctgagaggatcaagacccccccaaaacggccgggggggcggagaaggggtaggcttcctaacaactccagcaggccttccacccccacaatatccgtgcttgagtccaaggacacggactctgacagagaggctggcaccgaaactggtggcgagaataatgataaagaggaggaggagaagaaggacgagacaagctcttcctccgaagccaactcacggtgtcagacaccgatcaaaatgaaacctaacattgaaccgcccgaaaatgtggaatggtccggagccgaagccagcatgttccgggtgctgatcgggacctactatgataatttttgtgccattgccagactgattggtacaaaaacgtgtcgccaggtttacgagtttcgagtgaaggaaagctctattatcgcacccgtgcccacagaggatgtggacacgcctcctcgcaaaaagaaacgcaagcacagactgtgggccgcccactgcagaaagattcagctgaagaaagatggctcaagtaaccacgtgtataattatcagccatgcgatcatcctaggcagccctgtgacagctcatgtccctgcgttatcgcccagaacttttgtgagaaattttgccagtgtagcagtgagtgccaaaaccgcttccccggctgccggtgtaaggctcagtgcaatacaaaacagtgtccttgctatctggcagtgcgagagtgtgatcccgacctttgtctgacatgtggcgcagctgatcattgggattctaaaaacgttagctgtaagaactgctctatccagcggggtagcaagaaacatctcctcctcgcccccagcgatgtcgccggctggggtatcttcattaaggaccctgtgcagaagaatgagttcatctccgagtattgtggcgaaattatttctcaggacgaggcagataggagggggaaggtgtatgacaagtatatgtgctccttccttttcaatcttaacaacgattttgtcgtggacgccacacgcaaaggaaataaaataagattcgcaaatcatagcgtaaaccctaattgttatgccaaggttatgatggtcaatggcgatcaccgcataggaatctttgcgaagagagccattcaaaccggcgaagaactgttcttcgactacagatattcccaagcagacgccttgaagtacgtgggtatagagagggaaatggagatcccctaa

SEQ ID NO: 626 - DNA, 498 bp, synthetic construct
  source 1..498: mol_type = other DNA
atgaccctggaggagtttagcgccggggaacagaagaccgaaaggatggacaaggttggcgatgccctcgaggaagtactgtcaaaagctctgagccagcgcaccattaccgtgggagtctacgaggcagctaaactccttaatgtggaccctgacaatgtggtcctgtgccttttggccgctgacgaggacgacgaccgagacgtggcactgcaaatccacttcactctgattcaggctttttgttgtgagaacgatatcaatatactgagagttagcaaccctggacgcctggcagaacttttgctgctcgagacagatgcgggcccagccgcatctgaaggcgccgaacaaccgcctgacctccactgtgtgttggtaactaatccacatagtagtcagtggaaagatccagccctttcacagctgatctgtttctgcagggaatctcgctatatggaccagtgggtgccagtcatcaatctgcccgaaaggtaa

SEQ ID NO: 627 - DNA, 507 bp, synthetic construct
  source 1..507: mol_type = other DNA
atgctgggcacagtgaagatggagggacacgagacatccgattggaattcctattacgctgatacacaggaagcgtatagttctgtgcccgtatccaatatgaacagtgggctcgggtctatgaattcaatgaacacatacatgaccatgaacactatgactaccagtggcaatatgacaccagcttcctttaatatgtcttatgccaacccaggccttggcgccgggctttctccaggcgcggtcgcaggtatgcctggggggagtgctggcgccatgaattccatgactgccgctggcgtgactgctatgggcacagccttgagtcctagcgggatgggtgcaatgggagctcagcaggccgcatccatgaacggattgggtccttatgccgccgctatgaacccttgcatgtctcccatggcatacgctcctagcaatttgggccgaagtagggcgggcggcggtggagacgcgaagaccttcaaacgatcttatccccattaa

SEQ ID NO: 628 - DNA, 639 bp, synthetic construct
  source 1..639: mol_type = other DNA
aggcggcagaagcggttcaagtgtgaaaagcagccaggggccgggggagggggtggttctggaagcggagggtccggagctaaaggtggccccgagagtcggaaggacccatctggtgcctccaacccgtccgcagattcccccttgcatcgaggcgtccatggtaaaacagggcaactggagggagctcccgctcccgggccagctgcttctccccagacgctggatcacagtggcgccacggctactggtggtgcaagcgaactgaaaactccagcatcaagtaccgcgcctcccatctcttctgggcctggtgctctcgcctctgtccccgcatctcaccccgcccatgggttggccccacatgagagccagctgcacctcaagggggatccacactactcctttaatcaccccttttcaattaacaatctgatgagcagcagcgagcagcagcacaaattggatttcaaggcttatgaacaggccttgcaatactccccatacggatccacccttcccgccagcctccctctcggctctgcgtccgtgacgacaaggtcacctattgagcccagcgcacttgaacccgcctattaccagggggtatattctcgcccagtcctcaatactagctaa

SEQ ID NO: 629 - DNA, 510 bp, synthetic construct
  source 1..510: mol_type = other DNA
atgctccaggcctgcaagatggaaggcttccccctcgttccgcccccatctgaggatttggtcccctacgatacagatctctaccaacggcagacccacgagtattacccctacctttcaagcgacggcgagagtcactccgaccactattgggacttccacccccatcatgtgcattctgagttcgaatcctttgccgaaaataatttcacagagttgcagtctgtgcagcctcctcaactgcagcaactgtacagacacatggaactggagcaaatgcacgtcctcgacacacccatggtcccaccgcatccttctctcgggcaccaggtttcctatctccctagaatgtgcctgcaatacccatcattgagccctgcccaaccctccagtgacgaggaggaaggggaaagacagagtccaccactggaggtgtctgatggcgaggccgatgggctggaacctggccccggactcctgccgggggagacagggtccaagaagaaataa

SEQ ID NO: 630 - DNA, 1344 bp, synthetic construct
  source 1..1344: mol_type = other DNA
ccggttaatcatcttcggtgcgagaagctcacctttaacaatccgacgacagagttcagatataagctgctgcgagccggaggcgtgatggtcatgcctgaaggcgctgatacagtttcccgcccaagccctgactatcccatgctgcccaccatccctctgtccgcattcagtgatccaaaaaagaccaagcctagccacggctctaaggatgccaacaaggaatcatccaagacatcaaaaccccacaaagtgacaaaagagcatcgggagagacccagaaaggactctgaaagcaagagtagctcaaaggagctcgaaagggagcaggccaaatcctcaaaagacacaagcagaaagctgggggaggggcgcctgccaaaggaggaaaaagctccacctcccaaggcagccttcaaggagcctaaaatggcattgaaagagactaaactcgagtccacaagcccaaaaggtggcccccctcctcctccacctccaccacccagagcgtcctccaaaaggcctgctacagcagatagccctaaacctagtgctaagaagcagaagaagtcctcatctaagggcagtcgcagcgcccccggcacgtcccctcgaacttccagcagctcaagtttttcagacaagaagcccgccaaggataaaagctccactcggggcgagaaggtgaaggccgagagcgagcctcgggaagccaagaaggctctcgaggtcgaagagtctaatagtgaagatgaggcctctttcaaaagcgaatctgctcagtccagccccagcaattcaagcagctcatcagatagtagtagtgacagtgatttcgagcctagtcagaaccactctcaaggtcctttgagaagtatggtggaggacctccaatctgaggagagcgacgaagacgattcctcaagcggcgaggaagctgcagggaaaacgaaccctggtagggacagcagacttagcttctccgattcagagagcgataattctgccgactcctccctgccttccagagaaccaccacccccacagaagccaccccctccaaactccaaggtgtctggtaggcgcagtccagaatcttgctccaaacccgagaaaatcttgaaaaaaggcacctacgacaaagcctacacagatgaactcgttgagctgcacagacgcctgatggccctccgcgagcggaatgtgctccaacagatagtgaacctcatcgaggagacgggccacttcaatgtcaccaataccacattcgactttgatcttttcagcctcgatgaaactacagttcgcaagcttcagtcctgcctggaggcagtcgcaacctaa

SEQ ID NO: 631 - DNA, 663 bp, synthetic construct
  source 1..663: mol_type = other DNA
atgttgttcatcaacgctaccaagcagtccgataaactccagtccctcctgcccagcgaaactggactcggttatctgcatagggatgccggaggagcaaaggaagagaacatggggataatcacctttgagtgcatcacaaacgaccgcgagccagatcatttgataaagctgattacgctgaagaacattttctcacggcagctgcccaaaatgccaagagaatatattgtgcgcctggtctttgatcggaaccactacactttctgtctgcttaaaaagaacaccgtcattggcggcgtctgcttcagaccatacttcgaacagaaattcgccgaaattgctttcctggctgtgacatcaacagaacaggttaagggctacgggacccgattgatgaaccacctgaaagagcacgtgaaaaaatttgggattgagtacttccttacatatgcggacaatttcgctattggctattttcggaaacagggattttctcagaaaatctccatgccaaaggagcggtggtttggctatattaaagattacgatgggggcactctcatggagtgctatattttcccaaatatcaattaccttcgcctgagtgagatgttgtacgagcaaaaaaaggccgtaaaaaaggccatccacttcatctaa

SEQ ID NO: 632 - DNA, 822 bp, synthetic construct
  source 1..822: mol_type = other DNA
atgggaaatctgatgattagctttctcaaaaaagacacacaatccatcaccctggaagaacttgctaagatcattaaaaagtgcaaacacgtcgtagcactcacgggctctggaacctccgctgagtctaacataccttcctttagagggtcctctaattcaatttggtcaaaatacgatccgcggatctacgggaccatctggggattttggaagtatcctgagaaaatctgggaggttattcgcgacatttcatcagattacgagattgaaataaataacggccacgtggctctctctaccctcgagtcactcggataccttaagtcagtagtaacccagaacgttgacggactgcacgaggcgagcggaaacacaaaagtgatctccctccacggcaacgttttcgaagccgtgtgctgtacttgtaataagattgtgaaactcaacaagatcatgctgcagaagacctcacacttcatgcaccagcttcccccagaatgcccatgtggaggtatcttcaagcccaacataatcctcttcggcgaagtcgtcagcagtgaccttttgaaagaggcagaggaggagattgctaagtgcgatttgctgcttgtgatagggacatcttctacagtctctaccgcgaccaacctctgccactttgcatgcaagaagaagaaaaagatcgttgagatcaacatctctaagacctatattactaacaaaatgagcgattatcatgtgtgcgccaagttcagtgagctgaccaaagtagccaatattctgaagggcagcagcgagaagaataaaaagataatgtaa

SEQ ID NO: 633 - DNA, 1098 bp, synthetic construct
  source 1..1098: mol_type = other DNA
atggtgaaagatgctttcaaagacatcagcatctacttcacaaaagaggaatgggcagaaatgggggattgggagaaaacccgctaccgcaatgtcaaaaggaattacaacgcactgataaccatagggctgcgcgcaacccgaccagcgtttatgtgtcatcgaagacaggccattaaactgcaagttgacgatactgaggattctgacgaggagtggacccctcgccaacaggtcaagcctccttggatggctctccgcgttgaacagcgcaaacatcagaaggggatgcctaaagctagcttcagtaatgaatccagtctgaaggaactcagtcggaccgcaaatctcctgaatgcaagcgggtccgagcaagcccagaagccggtgtccccttccggagaagctagtaccagcggccagcattccagactcaagctcgagttgcggaaaaaagaaacagaaagaaaaatgtatagcctgagggagcgcaaaggacatgcctacaaagaggtctctgagccccaggacgatgattatctttattgcgaaatgtgtcaaaacttcttcatcgactcttgtgctgcccatggtccgcctacttttgtgaaagattccgcggtcgataaaggacatccaaatcgctccgcactgtctctgccccctggcttgcggatcggtccatcaggcattccccaggccgggcttggcgtgtggaacgaagcaagcgacctgcctttggggcttcatttcggcccttatgaggggcgcattaccgaagatgaggaagcagctaacaatgggtatagttggctcatcaccaagggccgcaattgctacgaatacgtggacgggaaagataagagctgggcaaactggatgcgctatgtgaactgcgcaagagacgacgaagaacagaatttggtggcctttcagtaccaccgacagatattttaccgcacctgtagggtaattagacctggctgtgagctcctggtctggtacggcgatgagtacgggcaggagctgggcattaaatggggttcaaaatggaagaaggagctcatggccggcagggaacccaaacccgagatctaa

SEQ ID NO: 634 - DNA, 459 bp, synthetic construct
  source 1..459: mol_type = other DNA
atgtccaccccggcccgacgccggctcatgcgagattttaagcgcctccaagaagatccaccagcgggggtttctggcgccccctccgagaacaacatcatggtttggaatgctgttatcttcggcccggaaggaacaccgtttgaagatgggaccttcaagcttaccatagaattcacggaagagtatcctaataagccccccactgtgagattcgtgtctaagatgttccatcccaacgtatatgctgacggtagtatctgcctggacattcttcaaaaccgctggtcacccacttacgatgtctcttccatcctcacctctattcaatccctcctcgacgaacccaaccctaattcccctgctaacagccaggctgcgcaactctaccaggaaaataaaagggaatacgagaagcgcgtctctgctatcgtggagcagagctggagggattgctaa

SEQ ID NO: 635 - DNA, 993 bp, synthetic construct
  source 1..993: mol_type = other DNA
atgggcgaaaaacttgaacttcggcttaaaagccccgtgggcgctgaacctgcagtgtatccttggcctctgccggtatatgacaagcatcatgatgcagctcatgaaattatcgaaacaatccgctgggtttgtgaggaaattcccgacctcaaactggccatggagaactatgtgctgattgactacgacacaaagtctttcgaatcaatgcagaggctgtgtgacaagtacaaccgagccattgacagcatacaccagctgtggaagggtactacacagcctatgaagctgaacacacgaccgagcacaggcctgcttagacacattctgcagcaggtttataatcattcagtcacagaccccgaaaagctcaataattacgaaccattcagccctgaggtgtacggggagacaagctttgatcttgtcgcgcagatgattgatgagatcaagatgactgacgacgatctgttcgtggatcttgggagtggtgtgggccaggtggtacttcaggttgccgctgctaccaattgtaagcaccactatggggtggaaaaggccgacattcctgccaaatacgctgaaacaatggatcgagagttccgcaagtggatgaaatggtacggcaagaagcacgctgagtacacccttgagcgcggagattttttgagtgaggagtggcgagagcggatcgccaatacatccgtgatatttgttaacaattttgctttcggaccagaagtggaccaccaactcaaggagagatttgccaacatgaaggaaggcgggcgaatagtgagttccaagccttttgccccactgaatttccggattaacagcagaaaccttagcgatatcggcactatcatgagggttgtcgaactgagccctttgaagggctctgtgtcttggacaggcaaacctgtgagctattatctgcataccatcgaccggacaatcctggagaactatttctccagccttaagtaa

SEQ ID NO: 636 - DNA, 1149 bp, synthetic construct
  source 1..1149: mol_type = other DNA
ggctctgctgccatcgccgaggtgcttctcaacgcgagatgtgatttgcatgccgtgaattaccatggtgacacaccgttgcacattgcggccagagaaagctatcacgattgcgtgttgctttttctgtctagaggggctaatccggagctgaggaacaaggagggggacacggcctgggatctgaccccagagagatccgacgtatggtttgcacttcaactgaatcggaagctgcgactgggtgtggggaacagagctattagaactgagaaaatcatctgcagagatgtggccaggggctatgagaatgttccaataccgtgtgtgaacggggttgatggcgaaccttgtccggaggactacaagtacatatccgagaattgtgaaacttccaccatgaatatcgacaggaacattacccacctgcagcactgcacatgcgtggatgactgctccagcagtaattgtctttgcgggcagctgtctatacgctgttggtacgataaagacgggaggctgctgcaggagttcaacaagatcgaacctccgctcatcttcgagtgtaaccaggcctgttcctgctggcgcaattgtaagaatagagttgtccagtccggcattaaagtgcgactgcagctgtatcgcaccgcaaagatgggctggggggtacgcgcactgcagactattccccaggggacttttatctgcgagtatgtcggcgagttgataagcgatgcagaggccgatgtccgcgaagacgacagctacctgtttgatcttgataacaaagatggggaagtttactgcattgacgccagatactacggcaatatatcacgatttatcaatcacctgtgtgacccaaacattatcccggtcagggtgttcatgctccaccaggatttgcgcttcccaaggattgccttttttagctctagagatatcagaaccggtgaagagctcggctttgattacggtgatcgcttttgggatatcaaatctaaatacttcacttgccagtgcggtagcgagaagtgtaagcattccgccgaagcaatcgcactggaacagtccaggctcgcccgacttgacccacacccggaactgctgccggagctgggtagtcttccaccagtgaatacataa

SEQ ID NO: 637 - DNA, 1239 bp, synthetic construct
  source 1..1239: mol_type = other DNA
atggccgagaatctgaagggatgctcagtgtgctgtaagtccagttggaatcagcttcaggatctgtgtagactggctaaactgagttgcccagccctgggcatcagtaagagaaacctttacgacttcgaagtggagtatctttgtgattataaaaagattagagaacaagagtattaccttgtaaagtggagagggtatcccgatagcgagagcacatgggaaccccggcagaacttgaagtgcgtccgcatccttaaacagtttcataaggatctcgaacgcgagctcctgcggcggcaccatagatcaaagacaccacggcacctggatccctccctcgcgaattatcttgtgcagaaggcgaagcagcgaagggccctccgcagatgggagcaagaacttaatgccaagcgctctcaccttggtcggattacagtcgagaatgaagtggatctcgacgggcccccccgcgcatttgtgtatatcaacgaatatcgagtcggcgaggggatcacactgaaccaggtagccgtcggctgcgaatgtcaggactgcctttgggcaccaaccgggggctgttgccctggtgcctcactccacaagttcgcttacaatgatcagggccaagtgaggctgagggccggcttgccaatttacgagtgcaacagcaggtgcaggtgtggctatgattgccccaatcgggtagtccaaaaaggcattaggtacgacttgtgcatattcagaacagacgacggcagaggttggggcgtgaggactctcgaaaagatccggaagaatagcttcgtgatggagtatgtgggtgaaatcattacctctgaggaggctgagagaagagggcagatttatgatcggcaaggggccacatacttgttcgatctcgactatgtcgaagacgtttatactgtcgatgccgcctactatggcaacatctcccatttcgtgaatcatagctgtgaccccaatttgcaggtgtataacgtttttatagacaatttggacgagaggctgccaagaattgcctttttcgcaactagaaccattcgcgccggcgaggagttgacatttgactataacatgcaagttgatccagtagacatggaatccacaagaatggactctaactttggtctggctggcctcccaggatcccctaaaaagagagttcggatagaatgcaagtgcggaacagaatcctgtaggaagtatttgttttaa

SEQ ID NO: 638 - DNA, 1935 bp, synthetic construct
  source 1..1935: mol_type = other DNA
cggctcgggctgaaggaggggcgcccattctccggagttactgcctgcctggacttttgcgcccacgcacacagagatctgcacaacatgcagaatggctcaactctcgtgtgtaccctgaccagggaggacaacagagagttcggcggcaaacctgaagacgagcaacttcacgtccttccgctgtacaaggtgagtgacgtcgatgagtttggttccgtagaagcccaggaagagaaaaagaggtctggtgctatccaggtgctgtcctcatttcgccggaaggtgaggatgctcgccgaacccgtcaagacatgccggcagcggaagttggaagccaagaaggctgctgcagagaagctgtcaagcctggagaactcaagcaataagaatgagaaggaaaagagcgctcctagcaggacaaagcagactgagaacgcttctcaggctaagcaattggctgaattgcttcggttgagtgggcccgtcatgcaacagagtcagcagccacagccactccagaaacagcctcctcaaccacagcagcaacagcggccacagcagcaacaaccccaccatccacagacagaatctgtgaattcttactctgcttccggtagcaccaatccctacatgagaaggccaaacccggtgagtccatatcctaactccagccacaccagtgatatctatggtagcacctctccgatgaatttctacagcacctcctctcaagcggctggcagctacttgaatagttcaaatcccatgaacccgtaccccggtcttctcaaccagaatactcaatacccctcctatcagtgcaatggcaacttgtcagtggataattgcagtccatatctggggtcttatagcccccagagccaaccaatggacttgtatcgctaccctagccaagatcctctgtcaaaactgagtttgccccctatacatactctgtatcagcctcggtttgggaactcacagtcttttacctctaagtatcttgggtatggtaaccaaaatatgcagggagacggattctcttcatgtaccataaggccaaatgttcatcatgtgggtaagctcccgccttatcctacacatgaaatggacggtcattttatgggagccacttcaagactgccgccaaatctgagcaaccctaatatggattacaagaatggtgaacaccatagcccatcccatataatccacaattatagcgccgcccccgggatgtttaattcaagcctccacgcccttcacctgcagaacaaggaaaacgatatgctgagccataccgccaatggcctttctaagatgctcccagcactgaaccacgatagaacggcgtgtgtccaaggcggacttcataaactctcagatgctaatgggcaggaaaaacaaccactcgcactggtgcagggagtggcatctggtgcagaagacaatgatgaggtctggagcgactcagaacagtcatttctggatccggacattggcggggtagcagttgcccctacacacgggtctatattgattgaatgcgccaaaagagaactgcatgcaaccactcccctgaaaaatcctaatcgcaatcacccaacacgaattagccttgtcttctatcagcacaaatctatgaacgagccgaagcacggcttggctctgtgggaggccaagatggccgaaaaagccagggagaaagaggaggagtgtgaaaagtatggtcctgactacgtgccacagaaatcacatggaaagaaagtgaaaagagagcccgccgagccacatgagacctctgagcccacataccttagattcatcaagtccctcgccgagagaacaatgagcgttacaacggattctactgttacaacaagtccctatgccttcacacgcgtaaccggcccttataatcggtacatctaa

SEQ ID NO: 639 - DNA, 1356 bp, synthetic construct
  source 1..1356: mol_type = other DNA
ttgctcgacccagggacacccatggatgccgatcttgttgcctccagtacagtggtatgggaacaggatgcggatcccttcgctggtactgcggatgatttcccggcattcaatgaagaggagttggcatggctgatggagctcctgcctcagggaggctcaggcggtttgttggacccagggactccaatggacgcagatctcgtggccagctctacagtggtctgggagcaggacgccgatcctttcgcagggactgccgacgacttccctgctttcaacgaagaagagctcgcgtggctgatggaattgttgccacaggcacgcggcgggagtggcggactgttggaccccggaactcctatggacgctgatcttgtagcttcttccacggtcgtatgggagcaggacgccgaccccttcgctggtaccgccgacgacttccctgctttcaatgaagaggagttggcttggttgatggagttgctgcctcaaggtggttcaggaggtctccttgaccctggcacacccatggatgcggatctggttgcaagttcaaccgtagtgtgggagcaggatgcagatccattcgctggcaccgccgacgactttcctgcttttaatgaagaagagttggcatggctcatggaactgctgcctcaggccagaggcggttcaggaggtttgctggatcccgggacaccgatggacgctgacctcgtagccagctctactgtcgtttgggaacaggatgcagaccctttcgctgggactgcggacgattttcctgcctttaatgaggaagagctggcctggctgatggaactcctccctcagggcggttctgggggactccttgaccctgggacccctatggacgcagacctggtagccagttcaacggttgtgtgggagcaagacgccgatccttttgccggaacggctgacgatttcccagccttcaacgaggaggagttggcatggctcatggagttgctccctcaggcgagaggaggctcaggaggcggtggttccggcggagatgccctggatgattttgacctggacatgttggggagcgatgcccttgatgattttgacctggatatgctcggtagtgatgcactcgacgattttgatctcgacatgttggggagtgacgccctcgatgatttcgacttggacatgctggccagggggtccgatgctctggacgattttgacctcgacatgctgggcagtgacgccctggacgattttgatctggacatgctggggtccgacgctctcgacgattttgacctcgacatgctcgggagtgatgccctggacgatttcgatcttgatatgctctaa

SEQ ID NO: 640 - DNA, 318 bp, synthetic construct
  source 1..318: mol_type = other DNA
gatagcgcatggcgactgaggattcctgagtctacatgcgctaaggacatccagaaggctgccgctgaagccgcactggcttttcaggatgaaacctgtgacacaactactaccaaccacggcctggatatggaggagacaatggttgaagccatttatactccagaacagtctgaaggcgccttctatatggacgaggaaacaatgttcgggatgccgacactgctggataatatggctgaggggatgcttctgccacctcctagtgtgcaatggaatcataactacgatggggagggggatggcgatgttagttaa

SEQ ID NO: 641 - DNA, 153 bp, synthetic construct
  source 1..153: mol_type = other DNA
gacgctctggacgattttgaccttgacatgctcggatctgatgctctggacgattttgatcttgatatgcttggaagtgacgccctcgacgattttgatctcgacatgttgggatcagatgcgttggatgatttcgacctggatatgctgtaa

SEQ ID NO: 642 - DNA, 387 bp, synthetic construct
  source 1..387: mol_type = other DNA
gacgcgctcgacgactttgacttggacatgctcggctccgacgcactggacgacttcgacctggatatgttgggcagtgacgccctcgatgattttgatctcgacatgctcggctcagacgcccttgatgacttcgacctggatatgctgggctctgacgcattggacgactttgacttggatatgctggggtccgacgccttggacgactttgatctggatatgctcggatccgacgcgctcgacgattttgatctcgatatgttggggagcgacgcgctcgacgacttcgacttggacatgctgggctctgatgctctcgacgattttgatctggatatgctgggaagcgacgctctggacgatttcgacctcgacatgttgtaa

SEQ ID NO: 643 - DNA, 2841 bp, synthetic construct
  source 1..2841: mol_type = other DNA
cccaccgtcgcctctatcagggagctgatggaggaacggtacggcgaaaaaggaaaggccattagaattgagaaagtcatctacacgggtaaagaagggaaatcatctaggggatgtcccatcgccaagtgggtgatacggaggcacacactcgaagagaaactgctctgtctggtacgacatcgcgcagggcaccactgccaaaatgccgttatcgtcatcctgatactcgcttgggagggcatcccccgcagcctgggcgatactttgtaccaggagctcacagataccttgcggaagtatggcaatcctacaagcagacgctgcggcctgaatgatgacaggacttgtgcttgccagggaaaggacccgaacacctgtggggcttcctttagctttgggtgcagctggtccatgtacttcaatggctgtaaatacgcaaggtctaagacgccgaggaaatttagactggcaggcgataaccccaaagaggaggaggtgttgcggaaaagtttccaggatctcgccactgaggtcgccccactgtataaacggttggcaccgcaagcctaccagaaccaagtcacaaatgaagagatcgccattgattgcaggctgggattgaaagaaggacgccccttcgcaggcgtgacggcgtgtatggacttctgtgcacacgcacacaaggatcagcataatctgtacaatggatgcacagtggtttgcaccctgactaaggaagacaatcggtgcgtcggcaagatacccgaggatgaacagctgcatgtcctccctctgtacaaaatggctaacacagacgagttcgggagcgaggaaaaccaaaatgcaaaagtcggctccggggcaatacaagttcttactgccttccctagggaggtgcggagactgccagaacccgctaaaagttgcagacagaggcagcttgaagcgaggaaagcagccgctgaaaagaaaaagatccagaaggagaagctctccactccggagaaaatcaagcaggaggcactggagcttgcagggatcaccagtgatccaggcttgtcactgaaagggggtctctctcagcagggcctgaagcctagccttaaagttgaaccacagaatcacttttcctctttcaaatactcaggtaacgcagttgtggaatcttattcagtcctggggaattgcagaccttccgatccgtatagcatgaactcagtgtatagctatcactcctactatgcccagccttctcttacatccgtcaacggatttcacagcaagtacgcgctcccaagtttctcatattacggattccccagctctaatcccgtgttcccgagccagtttcttggtcctggtgcttgggggcactctggctcttccggctcattcgagaagaaacctgacctgcatgccctccacaacagcctgtctcccgcctacggaggggccgaatttgccgagcttccgagtcaagccgttcccacagacgcccatcacccaactccacaccatcaacagcccgcctatcccggaccgaaggagtaccttctgcccaaagcaccactgctgcatagtgtgtcaagggatccttcaccattcgctcagagttcaaactgctataatagatccattaaacaggagcccgttgatccactgactcaggccgagccagttccacgcgacgcaggcaagatgggcaagacgcccctgtcagaggttagtcagaatggagggccttcacacctttgggggcagtactccggcgggccttccatgtcccccaagcggactaacggcgtaggcgggtcatggggcgtgtttagcagcggagaatcaccagccatcgtgcctgacaagctgagtagcttcggtgcaagctgcctcgcaccttcccatttcactgacggacaatgggggctgtttccgggagaaggccagcaggccgcctctcattctggaggtcgcctgcggggcaagccctggtccccctgtaagttcggaaacagcacctcagcactggcaggaccttccctgaccgaaaaaccctgggctctgggcgcaggagactttaacagcgccctgaaagggtctcccgggtttcaggataagctctggaacccaatgaaaggtgaggagggacggatcccagctgccggcgccagtcaactggatagagcctggcaatctttcggtctccctctgggatccagtgagaagcttttcggagccctgaaaagcgaagaaaagctctgggacccttttagtctcgaagaaggacctgcggaggagccgccttcaaaaggcgctgtgaaagaagagaaaggaggggggggcgcagaggaggaggaggaagaactgtggtcagatagtgagcacaattttctcgatgagaacattggcggagtcgctgttgccccagcacacggcagtatcctgatagagtgtgctaggcgagaattgcatgcgaccaccccgttgaaaaagccgaacaggtgccacccgaccagaatcagcctggtcttctaccagcacaagaatctcaatcagccgaaccatggtctggctctctgggaggctaaaatgaagcagctggccgaaagagctagagctcggcaggaggaagccgccaggctggggttgggacaacaggaagccaaattgtacggcaagaaacgcaagtggggcggcacagtcgttgcagagccccagcagaaagaaaaaaagggtgttgtcccaacaagacaagcgctggccgtccccactgacagcgccgttactgtatcctcctacgcgtacactaaagttaccggcccctacagcaggtggatataa

SEQ ID NO: 644 - DNA, 942 bp, synthetic construct
  source 1..942: mol_type = other DNA
ccttcagggcagatcagcaaccaggccctggctctggcccctagctccgctccagtgctggcccagactatggtgccctctagtgctatggtgcctctggcccagccacctgctccagcccctgtgctgaccccaggaccaccccagtcactgagcgctccagtgcccaagtctacacaggccggcgaggggactctgagtgaagctctgctgcacctgcagttcgacgctgatgaggacctgggagctctgctggggaacagcaccgatcccggagtgttcacagatctggcctccgtggacaactctgagtttcagcagctgctgaatcagggcgtgtccatgtctcatagtacagccgaaccaatgctgatggagtaccccgaagccattacccggctggtgaccggcagccagcggccccccgaccccgctccaactcccctgggaaccagcggcctgcctaatgggctgtccggagatgaagacttctcaagcatcgctgatatggactttagtgccctgctgtcacagatttcctctagtgggcagggaggaggtggaagcggcttcagcgtggacaccagtgccctgctggacctgttcagcccctcggtgaccgtgcccgacatgagcctgcctgaccttgacagcagcctggccagtatccaagagctcctgtctccccaggagccccccaggcctcccgaggcagagaacagcagcccggattcagggaagcagctggtgcactacacagcgcagccgctgttcctgctggaccccggctccgtggacaccgggagcaacgacctgccggtgctgtttgagctgggagagggctcctacttctccgaaggggacggcttcgccgaggaccccaccatctccctgctgacaggctcggagcctcccaaagccaaggaccccactgtctcctaa

SEQ ID NO: 645 - DNA, 759 bp, synthetic construct
  source 1..759: mol_type = other DNA
ccttcagggcagatcagcaaccaggccctggctctggcccctagctccgctccagtgctggcccagactatggtgccctctagtgctatggtgcctctggcccagccacctgctccagcccctgtgctgaccccaggaccaccccagtcactgagcgctccagtgcccaagtctacacaggccggcgaggggactctgagtgaagctctgctgcacctgcagttcgacgctgatgaggacctgggagctctgctggggaacagcaccgatcccggagtgttcacagatctggcctccgtggacaactctgagtttcagcagctgctgaatcagggcgtgtccatgtctcatagtacagccgaaccaatgctgatggagtaccccgaagccattacccggctggtgaccggcagccagcggccccccgaccccgctccaactcccctgggaaccagcggcctgcctaatgggctgtccggagatgaagacttctcaagcatcgctgatatggactttagtgccctgctgtcacagatttcctctagtgggcagggaggaggtggaagcatggagcttctttctcctcctctgcgggatgttgacctgactgcgcccgacggctctctttgctccttcgccacaaccgacgacttctacgatgatccatgttttgacagccccgatctcaggttctttgaggatctcgatcctagactgatgcacgtgggcgcactgctcaaacctgaggaacatagctaa

SEQ ID NO: 646 - DNA, 387 bp, synthetic construct
  source 1..387: mol_type = other DNA
gacgcgctggacgatttcgatctcgacatgctgggttctgatgccctcgatgactttgacctggatatgttgggaagcgacgcattggatgactttgatctggacatgctcggctccgatgctctggacgatttcgatctcgatatgttagggtcagacgcactggatgatttcgaccttgatatgttgggaagcgatgcccttgatgatttcgacctggacatgctcggcagcgacgccctggacgatttcgatctggacatgctggggtccgatgccttggatgattttgacttggatatgctggggagtgatgccctggacgactttgacctggacatgctgggctccgatgcgctcgatgacttcgatttggatatgttgtaa

SEQ ID NO: 647 - DNA, 1161 bp, synthetic construct
  source 1..1161: mol_type = other DNA
ggtaccggcagcgccgccatcgccgaagtccttctgaatgcgcgctgtgacctccatgctgtcaactaccatggggacacccccctgcacatcgcagctcgggagagctaccatgactgcgtgctgttattcctgtcacgtggggccaaccctgagctgcggaacaaagagggggacacagcatgggacctgactcccgagcgctccgacgtgtggtttgcgcttcaactcaaccgcaagctccgacttggggtgggaaatcgggccatccgcacagagaagatcatctgccgggacgtggctcggggctatgagaacgtgcccattccctgtgtcaacggtgtggatggggagccctgccctgaggattacaagtacatctcagagaactgcgagacgtccaccatgaacatcgatcgcaacatcacccacctgcagcactgcacgtgtgtggacgactgctctagctccaactgcctgtgcggccagctcagcatccggtgctggtatgacaaggatgggcgattgctccaggaatttaacaagattgagcctccgctgattttcgagtgtaaccaggcgtgctcatgctggagaaactgcaagaaccgggtcgtacagagtggcatcaaggtgcggctacagctctaccgaacagccaagatgggctggggggtccgcgccctgcagaccatcccacaggggaccttcatctgcgagtatgtcggggagctgatctctgatgctgaggctgatgtgagagaggatgattcttacctcttcgacttagacaacaaggatggagaggtgtactgcatagatgcccgttactatggcaacatcagccgcttcatcaaccacctgtgtgaccccaacatcattcccgtccgggtcttcatgctgcaccaagacctgcgatttccacgcatcgccttcttcagttcccgagacatccggactggggaggagctagggtttgactatggcgaccgcttctgggacatcaaaagcaaatatttcacctgccaatgtggctctgagaagtgcaagcactcagccgaagccattgccctggagcagagccgtctggcccgcctggacccacaccctgagctgctgcccgagctcggctccctgccccctgtcaacacaagtacctaa

SEQ ID NO: 648 - DNA, 1026 bp, synthetic construct
  source 1..1026: mol_type = other DNA
cggtaccccacggcagaatctcaagtgtgtgcgtatcctcaagcagttccacaaggacttagaaagggagctgctccggcggcaccaccggtcaaagaccccccggcacctggacccaagcttggccaactacctggtgcagaaggccaagcagaggcgggcgctccgtcgctgggagcaggagctcaatgccaagcgcagccatctgggacgcatcactgtagagaatgaggtggacctggacggccctccgcgggccttcgtgtacatcaatgagtaccgtgttggtgagggcatcaccctcaaccaggtggctgtgggctgcgagtgccaggactgtctgtgggcacccactggaggctgctgcccgggggcgtcactgcacaagtttgcctacaatgaccagggccaggtgcggcttcgagccgggctgcccatctacgagtgcaactcccgctgccgctgcggctatgactgcccaaatcgtgtggtacagaagggtatccgatatgacctctgcatcttccgcacggatgatgggcgtggctggggcgtccgcaccctggagaagattcgcaagaacagcttcgtcatggagtacgtgggagagatcattacctcagaggaggcagagcggcggggccagatctacgaccgtcagggcgccacctacctctttgacctggactacgtggaggacgtgtacaccgtggatgccgcctactatggcaacatctcccactttgtcaaccacagttgtgaccccaacctgcaggtgtacaacgtcttcatagacaaccttgacgagcggctgccccgcatcgctttctttgccacaagaaccatccgggcaggcgaggagctcacctttgattacaacatgcaagtggaccccgtggacatggagagcacccgcatggactccaactttggcctggctgggctccctggctcccctaagaagcgggtccgtattgaatgcaagtgtgggactgagtcctgccgcaaatacctcttcagtactaa

SEQ ID NO: 649 - DNA, 138 bp, synthetic construct
  source 1..138: mol_type = other DNA
atgtccaggcggaaacagagcaacccccggcagatcaagcgttccctcggagacatggaggccagagaggaggtgcagttggtgggtgccagccacatggagcaaaaggccacggcacctgaagccccgagcccttaa

SEQ ID NO: 650 - DNA, 360 bp, synthetic construct
  source 1..360: mol_type = other DNA
atgaaggagggtgaaaacaataagcccagggagaaatcagaaggaaacaagaggaaatccagtttctccaacagcgctgatgatattaaatctaaaaaaaagagagagcaaagcaatgatatcgctcggggctttgagagaggactggaaccagaaaagatcatcggagcaacagattcctgcggtgacttaatgttcttaatgaaatggaaagacacagatgaagctgacctggttcttgcaaaagaagctaacgtgaagtgtccacagattgtgatagcattttatgaagagagactgacgtggcacgcatatccagaggatgcggaaaacaaagaaaaagaaagcgcgaagagctaa

SEQ ID NO: 651 - DNA, 1257 bp, synthetic construct
  source 1..1257: mol_type = other DNA
atgtctgtggcgttcgcagccccgaggcagcggggcaagggcgaaatcacgcccgccgccatccagaagatgctggatgaaaacaaccatcttattcagtgtataatggactatcagaacaaagggaaggcctcggagtgctcgcagtatcagcagatattgcatacaaacctggtataccttgctacaatagcagactctaatcaaaatatgcagtctctcttaccagcaccgcccacacagactatgccaatgggtcctggagggatgagtcagagtggccctccaccccctccccgctctcacaacatgccttcagatggaatggtgggtgggggccctcctgcaccacacatgcagaaccagatgaacggccagatgcctgggcctaaccatatgccaatgcagggacctggacccagtcagctcagcatgacaaacagctccatgaatatgccttcaagtagccatggctccatgggaggttacaaccattctgtgccgtcatcccagagcatgcccgtgcagaaccagatgacaatgagtcaggggcagccaatgggaaactatggtcccagaccaaacatgaatatgcaaccaaatcaagggccgatgatgcaccagcagcctccttctcagcagtacaatatgccacctggaggggcacagcattaccaaggacagcaggcgcccatggggctgatgggccaagttaaccaaggcagtcacatgatgggccagcgacagatgcctccctacagacctccgcaacagggcccaccacagcagtactcaggccaggaagactattatggggaccaatacagtcatggtggacaaggtcctccagaaggcatgaaccagcaatattaccctgatggtcataatgattacggttatcagcaaccgtcgtatcctgaacaaggctacgataggccttatgaggattcctcacaacattactacgaaggaggaaactcccagtatggccaacagcaagacgcttaccagggaccacctccacagcaaggatacccaccccagcagcagcagtacccgggacagcagggatacccagggcagcagcagagctatggtccttcgcagggcggtccaggtcctcagtatcctaattatcctcagggtcaaggtcagcagtatgggggctatagaccaacacagccaggaccaccccagccaccccagcagaggccttatgggtacgaccagggacagtatggaaattaccagcagtaa

SEQ ID NO: 652 - DNA, 1173 bp, synthetic construct
  source 1..1173: mol_type = other DNA
gctagggacagcaaagtggagaacaaaacaaagaagctgagagtgttcgaagccttcgccggcattggcgcccagagaaaggccctggagaaagtgaggaaggacgagtacgagatcgtgggactggccgagtggtatgtgcccgccatcgtcatgtaccaggccatccataacaacttccacaccaagctcgagtacaagtccgtcagcagagaggagatgatcgactacctcgagaacaagaccctgtcctggaacagcaagaaccccgtcagcaacggatactggaagaggaagaaggatgacgagctgaagatcatctacaacgccatcaagctgtccgaaaaggagggcaacattttcgacatcagggacctctacaagaggacactgaagaacatcgacctgctcacctacagcttcccttgccaggacctgagccagctaggcatccagaagggcatgaagaggggaagcggcaccagatccggcctgctctgggagatcgaaagagccctggactccaccgagaagaacgacctgcctaagtacctcctcatggagaacgtgggagccctgctgcacaagaagaacgaggaggagctgaaccaatggaagcagaagctggagagcctgggctaccagaacagcatcgaagtcctcaatgctgccgatttcggatccagccaggccaggaggagagtgttcatgatctccaccctcaatgagttcgtggaactgcctaagggcgacaagaagcccaagagcatcaaaaaggtgctgaacaagatcgtgagcgagaaggacatcctcaacaacctgctgaaatacaacctcaccgaattcaagaagaccaagtccaacatcaacaaggccagcctgatcggctactccaagttcaactccgagggctatgtgtacgaccccgagttcacaggccccacactgacagctagcggcgccaactccaggatcaagatcaaggacggcagcaacatcaggaagatgaacagcgacgagaccttcctgtacatcggctttgacagccaggacggcaagagagtgaacgaaatcgagttcctgaccgagaaccagaagatcttcgtgtgtggcaacagcatcagcgtggaggtgctggaggccatcattgacaagatcggcggccctagctaa

SEQ ID NO: 653 - DNA, 1149 bp, synthetic construct
  source 1..1149: mol_type = other DNA
atggacgcgaaatcacttacggcatggtcgagaacactggttacgttcaaggacgtgtttgtggactttacacgtgaggagtggaaattgctggatactgcgcaacaaattgtgtatcgaaatgtcatgcttgagaattacaagaacctcgtcagtctcggataccagttgacgaaaccggatgtgatccttaggctcgaaaagggggaagaaccttggctggtatcgggaggtggttcgggtggctctggatcaagcccaaagaagaaacggaaggtggaagcctcagtgcaggtgaaaagggtgctggaaaaatcccccggcaaactcctcgtgaagatgcccttccaggcttcccctggcggaaaaggtgaagggggtggcgcaaccacatctgcccaggtcatggtcatcaagcgacctggaaggaaaagaaaggccgaggctgaccctcaggccattccaaagaaacggggacgcaagccagggtccgtggtcgcagctgcagcagctgaggctaagaaaaaggcagtgaaggaaagctccatccgcagtgtgcaggagactgtcctgcccatcaagaagaggaagactagggagaccgtgtccatcgaggtcaaagaagtggtcaagcccctgctcgtgtccaccctgggcgaaaaatctggaaaggggctcaaaacatgcaagtcacctggacggaaaagcaaggagtctagtccaaaggggcgctcaagctccgcttctagtccccctaaaaaggaacaccatcaccatcaccatcacgccgagtctcctaaggctcctatgccactgctcccaccacctccaccacctgagccacagtcaagcgaagaccccatcagcccacccgagcctcaggatctgtcctctagtatttgcaaagaggaaaagatgcccagagcaggcagcctggagagtgatggctgtccaaaagaacccgccaagacccagcctatggtggcagccgctgcaactaccaccacaaccacaactaccacagtggccgaaaaatacaagcatcgcggcgagggcgaacgaaaggacattgtgtcaagctccatgcccagacctaaccgggaggaaccagtcgatagtaggacacccgtgactgagagagtctcataa

SEQ ID NO: 654 - DNA, 1044 bp, synthetic construct
  source 1..1044: mol_type = other DNA
atggctagcagccccaagaagaagcggaaggtcgaggcaagcatggagaaggcatttcggccacactttttcaaccacgggaagccagacgcaaacccaaaggagaagaaaaactgccactggtgtcagatccgaagtttcgccacccatgctcagctgccaatctcaattgtgaatagggaagacgatgcttttctcaaccccaatttcaggttcatcgaccactctatcattggcaagaacgtgcccgtcgctgatcagagtttcagggtgggatgcagctgtgcatccgacgaggaatgcatgtactcaacttgccagtgtctggacgagatggcaccagacagtgatgaggaagccgatccctatacccgaaagaaaaggtttgcctactatagccagggcgctaagaaaggactgctcagggatagagtgctgcagtcccaggagcccatctacgaatgccatcaggggtgcgcctgttctaaggactgtcccaacagagtggtcgagcggggtcgcacagtgcctctgcagatcttcagaactaaagatcggggctggggagtgaagtgtcctgtcaatatcaagcgcgggcagtttgtcgatcgatacctgggcgagatcattaccagcgaggaagccgacaggagacgggctgaatccacaatcgcacgccgaaaggacgtgtatctgttcgccctcgataaattttcagaccccgatagcctggaccctctgctcgctggacagcccctggaggtcgatggggaatatatgtccggtcctacacggttcatcaaccactcttgcgacccaaatatggcaatttttgcccgcgtgggagaccatgctgataagcacatccatgacctggctctcttcgcaatcaaggatattcctaaaggcaccgagctgacatttgactacgtcaatgggctgactggcctggagtccgacgcacacgatccatctaagatcagtgaaatgactaagtgcctgtgtggcaccgccaagtgtcggggatatctctgggaattctaa

SEQ ID NO: 655 - DNA, 918 bp, synthetic construct
  source 1..918: mol_type = other DNA
atggctagcagcccaaagaagaagagaaaagtggaagcatcaatggcacctaaaagacagtcagcaatcctcccccagcctaaaaaaccaagacccgccgctgcacctaagctggaggacaaatcagccagcccagggctccccaagggcgagaaagaacagcaggaggcaatcgaacacattgatgaggtgcagaacgaaatcgaccggctgaatgagcaggccagcgaggaaattctcaaggtcgagcagaagtacaacaaactgcggcagccattctttcagaagcgcagtgagctgatcgctaaaattcctaacttctgggtgacaacatttgtcaatcacccacaggtgtctgcactgctcggcgaggaagatgaggaagccctgcattacctcacacgagtggaggtcactgagttcgaagacatcaagtccggatacaggattgatttctattttgacgagaacccctatttcgaaaataaggtgctgtctaaagagtttcatctcaacgagtccggcgatcctagctccaagtctaccgagatcaagtggaaaagtggaaaggacctgaccaaaagatctagtcagacacagaataaggcatccaggaaaagacagcacgaggaaccagagtcattctttacttggtttaccgatcatagcgacgccggcgctgatgagctgggagaagtgatcaaggacgatatttggcccaatcctctgcagtactatctcgtccccgacatggacgatgaggaaggggaggccgaagacgatgacgatgacgatgaggaagaggaaggtctggaggatatcgacgaggaaggggatgaggacgaaggcgaggaagacgatgacgaggatgaaggcgaggaaggagaggaagacgagggcgaagatgacgaattctaa

SEQ ID NO: 656 - DNA, 408 bp, synthetic construct
  source 1..408: mol_type = other DNA
atggctagcagccccaagaaaaaacggaaagtggaggcatcaatgaaggagggagaaaacaacaaacccagggagaaaagtgaagggaataagagaaaaagctccttctctaacagtgcagacgatatcaagtccaagaaaaagcgggagcagtctaatgacattgctaggggcttcgagagaggactggagccagaaaaaatcattggggcaaccgacagctgcggcgatctgatgtttctcatgaaatggaaggacacagatgaggccgacctggtgctcgccaaagaagctaacgtgaagtgtccccagatcgtcattgctttttacgaggaaaggctcacctggcacgcatatcctgaggatgccgaaaacaaggagaaggaatcagctaagagcgaattctaa

SEQ ID NO: 657 - DNA, 951 bp, synthetic construct
  source 1..951: mol_type = other DNA
atggctagctcccctaaaaagaagcgaaaggtcgaagccagtatgcccctccagattgtccaccacccagattacgatgccggatttgccaccaaccaccggttccctatgtctaagtatccactgctcatggaggctctgcgagcaaggggactcgcatcccctgatgccctgaacaccacagaacccgcacctgcctcttggctgaagctcgcccatgccgctgactacgtggatcaggtcatcagctgctccgtgccagagaaaatcgagagagaaattggttttccagtgggaccccgggtcagcctgcgagcacagctcgctactggaggaaccatcctggcagcacgactggccctccgacacgggattgcttgcaatactgcagggggtagtcaccatgcaaggagagcccagggagctgggttctgtacctttaacgatgtggctgtcgcatcactggtgctgctcgacgaaggcgctgcacagaatatcctggtggtggacctggacgtgcaccagggtgacggaaccgctgatattctgtcagacgagcccggtgtgttcaccttcagcatgcatggggaaaggaactaccccgtcagaaaaatcgcaagcgacctggatattgccctccctgatggaacaggggacgcagcttatctgcggcgcctcgccactatcctgcctgagctctccgccagagctcggtgggacattgtgttctacaacgctggcgtggatgtccacgcagaggacaggctgggaagactggctctctctaatggcggactgcgcgcccgagatgaaatggtcatcggccatttccgggctctgggaatcccagtgtgtggggtcattgggggtggctactctacagacgtgccagcactggccagtcgccatgcaattctgtttgaggtcgccagtacctatgctgaattctaa

SEQ ID NO: 658 - DNA, 705 bp, synthetic construct
  source 1..705: mol_type = other DNA
atggctagctcccccaaaaagaaacgcaaggtggaggcatctgctcgctatctcggtaacactgtcgatctgtcatcattcgatttccgcactggcaagatgatgccttctaaactgcagaagaacaaacagaggctgagaaatgacccactcaaccagaataagggaaaacccgatctgaacaccacactccctatccggcagacagctagtattttcaagcagcctgtgactaaagtcaccaaccacccatccaataaggtgaaatctgacccacagaggatgaatgagcagcccagacagctgttttgggaaaagcgcctgcagggtctctctgcaagtgatgtgacagagcagatcattaagactatggaactgccaaaaggactccagggagtgggacctgggtctaacgacgagactctgctctcagctgtcgcaagcgcactgcataccagctccgcacccatcacaggacaggtgagtgccgctgtcgagaagaacccagccgtgtggctgaatacttcacagcccctctgcaaggctttcatcgtcaccgacgaggatattcggaagcaggaggaacgcgtgcagcaggtccgaaaaatcctggaagacgctctcatggcagatattctgagcagagcagccgacaccgaggaaatggatattgagatggactccggggatgaagccgaattctaa

SEQ ID NO: 659 - DNA, 924 bp, synthetic construct
  source 1..924: mol_type = other DNA
atggctagcagccccaagaagaaaagaaaagtggaagcaagcaccgagatgagcgtcagaaaaatcgccgcacacatgaaatcaaacccaaatgccaaagtgatcttcatggtcggagcaggtatcagcacctcctgcggcatccccgactttcgatctccaggcacaggactgtaccacaacctcgctaggctgaagctcccatatcccgaggcagtgttcgacgtcgatttctttcagagtgatcctctgccattttacacactggctaaagagctctatcccggcaacttcaggccttcaaagtttcattacctgctcaaactgttccaggacaaggatgtgctcaaacgggtctatactcagaatatcgacaccctggagcgacaggcaggagtgaaggacgatctgatcattgaagcccacggaagctttgctcactgccattgtattgggtgcggtaaagtgtacccccctcaggtcttcaagtccaaactggcagagcatcccatcaaggactttgtgaaatgcgatgtctgtggggaactggtgaagccagccattgtcttctttggcgaggacctgcccgattctttcagtgaaacttggctgaatgactccgagtggctcagagaaaagatcaccacatctggcaaacacccccagcagcctctggtcatcgtggtcggaacctcactcgcagtgtaccctttcgccagcctgccagaggaaatccccaggaaggtgaaaagagtcctgtgtaacctggagacagtgggcgactttaaggccaacaagcggccaactgacctgatcgtgcatcagtattccgatgagttcgctgaacagctggtggaggaactcgggtggcaggaggattttgaaaagattctgaccgctcagggcggaatgggtgaattctaa

SEQ ID NO: 660 - DNA, 918 bp, synthetic construct
  source 1..918: mol_type = other DNA
atggctagctcaccaaagaagaaacgaaaagtggaagcaagtatgtctgtcaactacgcagcaggtctcagcccctacgccgataaaggcaaatgtggactgccagagatcttcgacccccctgaggaactggagcgcaaagtgtgggaactggcccgactcgtctggcagagctcctctgtggtcttccacacaggggccggtatcagtactgcttcaggcattcctgactttcggggcccacatggagtgtggacaatggaggaacgcggactggctcctaagttcgataccacatttgagagcgcaagaccaactcagacccacatggcactggtgcagctcgaacgagtcggactgctccgctttctggtgtcacagaacgtggacggcctgcacgtgcgatctggattccccagggataaactggccgagctccatggtaatatgtttgtggaggaatgcgctaagtgtaaaactcagtacgtccgagacaccgtggtcgggacaatgggtctcaaggcaactgggaggctgtgcaccgtggcaaaagctcgggggctgcgagcatgtcgaggcgagctccgcgataccatcctggactgggaagatagcctgccagacagggatctggcactcgccgacgaggccagcaggaacgcagatctgtccatcacactcgggacttctctgcagattagacccagtggcaacctgcctctcgctaccaagaggagaggcggacggctcgtgatcgtcaatctgcagcctacaaaacacgacagacatgcagatctgcggattcacggctatgtggacgaagtcatgaccaggctgatgaagcatctgggcctggagattccagcttgggatggacccagggtgctggaaagagcactgccacccctcgaattctaa

SEQ ID NO: 661 - DNA, 822 bp, synthetic construct
  source 1..822: mol_type = other DNA
atggctagcagccccaagaagaagagaaaggtcgaagcctcaatggtcggagcaggtatcagcacaccctcaggtattccagattttaggagccctggctctggactgtactccaacctccagcagtacgatctgccctatcctgaggctatctttgaactgcccttctttttccacaatccaaagccctttttcaccctggcaaaagagctctaccctggcaactataagccaaatgtgacacactacttcctgagactgctccatgataaaggactgctcctgcggctgtatactcagaacatcgacggcctggagcgcgtctcaggtattcctgccagcaagctggtggaagctcacgggacctttgccagcgctacctgcacagtgtgtcagcgacctttcccaggcgaggacatcagggcagatgtgatggcagaccgagtcccacgatgcccagtgtgcaccggcgtggtcaaacctgacattgtgtttttcggagaacccctgcctcagcggtttctcctgcatgtggtcgatttcccaatggccgacctcctgctcatcctgggcactagcctggaggtggaaccatttgcttctctgaccgaggcagtgcgaagctccgtcccaaggctgctcattaatagagatctggtcggacccctcgcatggcaccctaggagtagagatgtggcccagctgggcgacgtggtccatggagtggagtccctggtcgaactgctcggatggacagaggaaatgcgggacctggtgcagagagaaactgggaagctggacggtccagataaagaattctaa

SEQ ID NO: 662 - DNA, 1092 bp, synthetic construct
  source 1..1092: mol_type = other DNA
atggctagctcaccaaagaaaaaacggaaagtcgaagcctcaatgctccacacaacccagctctaccagcacgtccctgaaaccagatggcctatcgtgtactcccctcggtataacatcaccttcatggggctggagaagctccacccatttgacgccggcaagtggggaaaagtgattaatttcctgaaggaggaaaaactgctctctgacagtatgctggtggaggctcgcgaagcatccgaggaagatctgctcgtggtccatacaaggagatatctgaacgagctcaagtggtcttttgccgtcgctaccatcacagaaattccccctgtgatcttcctgccaaattttctcgtccagaggaaggtgctgagaccactccgaactcagaccggaggaactatcatggcaggcaaactggccgtcgagaggggatgggccattaacgtggggggtggcttccaccattgcagctccgacagaggagggggtttttgtgcatacgccgatatcaccctggctattaagttcctctttgagcgggtggaaggaatcagtcgcgccacaatcattgacctggatgctcaccagggcaacggacatgagcgagacttcatggacgataaaagggtctacatcatggacgtgtataatagacacatctacccaggcgatcggtttgccaagcaggctatccggcgcaaagtcgagctggaatggggaactgaggacgatgaatatctggacaaggtggagagaaacatcaagaaatctctgcaggaacatctccccgatgtggtcgtgtataacgctgggaccgacattctggagggcgacaggctgggcggactctcaatcagccccgcagggattgtgaagcgagatgaactggtcttccgcatggtgcgaggtcgaagggtccctatcctgatggtgacatcagggggttatcagaaaaggactgctagaatcattgcagacagcatcctgaacctctttgggctgggtctcattggccctgagtccccatctgtcagtgcacagaacagcgatacaccactgctcccaccagcagtgcctgaattctaa

SEQ ID NO: 663 - DNA, 2259 bp, synthetic construct
  source 1..2259: mol_type = other DNA
atgggccagactgggaagaaatctgagaagggaccagtttgttggcggaagcgtgtaaaatcagagtacatgcgactgagacagctcaagaggttcagacgagctgatgaagtaaagagtatgtttagttccaatcgtcagaaaattttggaaagaacggaaatcttaaaccaagaatggaaacagcgaaggatacagcctgtgcacatcctgacttctgtgagctcattgcgcgggactagggagtgttcggtgaccagtgacttggattttccaacacaagtcatcccattaaagactctgaatgcagttgcttcagtacccataatgtattcttggtctcccctacagcagaattttatggtggaagatgaaactgttttacataacattccttatatgggagatgaagttttagatcaggatggtactttcattgaagaactaataaaaaattatgatgggaaagtacacggggatagagaatgtgggtttataaatgatgaaatttttgtggagttggtgaatgcccttggtcaatataatgatgatgacgatgatgatgatggagacgatcctgaagaaagagaagaaaagcagaaagatctggaggatcaccgagatgataaagaaagccgcccacctcggaaatttccttctgataaaatttttgaagccatttcctcaatgtttccagataagggcacagcagaagaactaaaggaaaaatataaagaactcaccgaacagcagctcccaggcgcacttcctcctgaatgtacccccaacatagatggaccaaatgctaaatctgttcagagagagcaaagcttacactcctttcatacgcttttctgtaggcgatgttttaaatatgactgcttcctacatcgtaagtgcaattattcttttcatgcaacacccaacacttataagcggaagaacacagaaacagctctagacaacaaaccttgtggaccacagtgttaccagcatttggagggagcaaaggagtttgctgctgctctcaccgctgagcggataaagaccccaccaaaacgtccaggaggccgcagaagaggacggcttcccaataacagtagcaggcccagcacccccaccattaatgtgctggaatcaaaggatacagacagtgatagggaagcagggactgaaacggggggagagaacaatgataaagaagaagaagagaagaaagatgaaacttcgagctcctctgaagcaaattctcggtgtcaaacaccaataaagatgaagccaaatattgaacctcctgagaatgtggagtggagtggtgctgaagcctcaatgtttagagtcctcattggcacttactatgacaatttctgtgccattgctaggttaattgggaccaaaacatgtagacaggtgtatgagtttagagtcaaagaatctagcatcatagctccagctcccgctgaggatgtggatactcctccaaggaaaaagaagaggaaacaccggttgtgggctgcacactgcagaaagatacagctgaaaaaggacggctcctctaaccatgtttacaactatcaaccctgtgatcatccacggcagccttgtgacagttcgtgcccttgtgtgatagcacaaaatttttgtgaaaagttttgtcaatgtagttcagagtgtcaaaaccgctttccgggatgccgctgcaaagcacagtgcaacaccaagcagtgcccgtgctacctggctgtccgagagtgtgaccctgacctctgtcttacttgtggagccgctgaccattgggacagtaaaaatgtgtcctgcaagaactgcagtattcagcggggctccaaaaagcatctattgctggcaccatctgacgtggcaggctgggggatttttatcaaagatcctgtgcagaaaaatgaattcatctcagaatactgtggagagattatttctcaagatgaagctgacagaagagggaaagtgtatgataaatacatgtgcagctttctgttcaacttgaacaatgattttgtggtggatgcaacccgcaagggtaacaaaattcgttttgcaaatcattcggtaaatccaaactgctatgcaaaagttatgatggttaacggtgatcacaggataggtatttttgccaagagagccatccagactggcgaagagctgttttttgattacagatacagccaggctgatgccctgaagtatgtcggcatcgaaagagaaatggaaatcccttgataa

SEQ ID NO: 664 - DNA, 2739 bp, synthetic construct
  source 1..2739: mol_type = other DNA
atgcccgccatgccctccagcggccccggggacaccagcagctctgctgcggagcgggaggaggaccgaaaggacggagaggagcaggaggagccgcgtggcaaggaggagcgccaagagcccagcaccacggcacggaaggtggggcggcctgggaggaagcgcaagcaccccccggtggaaagcggtgacacgccaaaggaccctgcggtgatctccaagtccccatccatggcccaggactcaggcgcctcagagctattacccaatggggacttggagaagcggagtgagccccagccagaggaggggagccctgctggggggcagaagggcggggccccagcagagggagagggtgcagctgagaccctgcctgaagcctcaagagcagtggaaaatggctgctgcacccccaaggagggccgaggagcccctgcagaagcgggcaaagaacagaaggagaccaacatcgaatccatgaaaatggagggctcccggggccggctgcggggtggcttgggctgggagtccagcctccgtcagcggcccatgccgaggctcaccttccaggcgggggacccctactacatcagcaagcgcaagcgggacgagtggctggcacgctggaaaagggaggctgagaagaaagccaaggtcattgcaggaatgaatgctgtggaagaaaaccaggggcccggggagtctcagaaggtggaggaggccagccctcctgctgtgcagcagcccactgaccccgcatcccccactgtggctaccacgcctgagcccgtggggtccgatgctggggacaagaatgccaccaaagcaggcgatgacgagccagagtacgaggacggccggggctttggcattggggagctggtgtgggggaaactgcggggcttctcctggtggccaggccgcattgtgtcttggtggatgacgggccggagccgagcagctgaaggcacccgctgggtcatgtggttcggagacggcaaattctcagtggtgtgtgttgagaagctgatgccgctgagctcgttttgcagtgcgttccaccaggccacgtacaacaagcagcccatgtaccgcaaagccatctacgaggtcctgcaggtggccagcagccgcgcggggaagctgttcccggtgtgccacgacagcgatgagagtgacactgccaaggccgtggaggtgcagaacaagcccatgattgaatgggccctggggggcttccagccttctggccctaagggcctggagccaccagaagaagagaagaatccctacaaagaagtgtacacggacatgtgggtggaacctgaggcagctgcctacgcaccacctccaccagccaaaaagccccggaagagcacagcggagaagcccaaggtcaaggagattattgatgagcgcacaagagagcggctggtgtacgaggtgcggcagaagtgccggaacattgaggacatctgcatctcctgtgggagcctcaatgttaccctggaacaccccctcttcgttggaggaatgtgccaaaactgcaagaactgctttctggagtgtgcgtaccagtacgacgacgacggctaccagtcctactgcaccatctgctgtgggggccgtgaggtgctcatgtgcggaaacaacaactgctgcaggtgcttttgcgtggagtgtgtggacctcttggtggggccgggggctgcccaggcagccattaaggaagacccctggaactgctacatgtgcgggcacaagggtacctacgggctgctgcggcggcgagaggactggccctcccggctccagatgttcttcgctaataaccacgaccaggaatttgaccctccaaaggtttacccacctgtcccagctgagaagaggaagcccatccgggtgctgtctctctttgatggaatcgctacagggctcctggtgctgaaggacttgggcattcaggtggaccgctacattgcctcggaggtgtgtgaggactccatcacggtgggcatggtgcggcaccaggggaagatcatgtacgtcggggacgtccgcagcgtcacacagaagcatatccaggagtggggcccattcgatctggtgattgggggcagtccctgcaatgacctctccatcgtcaaccctgctcgcaagggcctctacgagggcactggccggctcttctttgagttctaccgcctcctgcatgatgcgcggcccaaggagggagatgatcgccccttcttctggctctttgagaatgtggtggccatgggcgttagtgacaagagggacatctcgcgatttctcgagtccaaccctgtgatgattgatgccaaagaagtgtcagctgcacacagggcccgctacttctggggtaaccttcccggtatgaacaggccgttggcatccactgtgaatgataagctggagctgcaggagtgtctggagcatggcaggatagccaagttcagcaaagtgaggaccattactacgaggtcaaactccataaagcagggcaaagaccagcattttcctgtcttcatgaatgagaaagaggacatcttatggtgcactgaaatggaaagggtatttggtttcccagtccactatactgacgtctccaacatgagccgcttggcgaggcagagactgctgggccggtcatggagcgtgccagtcatccgccacctcttcgctccgctgaaggagtattttgcgtgtgtgtaa

SEQ ID NO: 665 - DNA, 708 bp, synthetic construct
  source 1..708: mol_type = other DNA
atggctagctctcccaaaaagaagcgaaaggtcgaagcctctatgactaccaactccactcaggacacactgtatctcagcctccacggcggaatcgactccgccatcccataccccgtgaggagagtcgagcagctgctccagttctcttttctgcccgaactccagttccagaacgccgctgtgaaacagagaatccagcgcctgtgctatagagaggaaaagcggctggctgtcagctccctcgcaaagtggctgggccagctccacaaacagaggctgagagcaccaaagaacccccctgtggccatttgttggatcaatagttacgtgggctatggagtctttgcccgggagtctattcccgcttggagttacatcggcgaatataccggcatcctgcggcgccgacaggctctgtggctcgacgagaacgattactgcttccgctatcctgtgccacgctactcattccgatattttaccatcgacagcgggatgcagggtaacgtcacaaggttcatcaatcactccgataaccctaatctggaggcaatcggggccttcgaaaacggtatcttccatatcatcatcagggccatcaaggatatcctgcccggggaggaactctgttaccactatggacctctgtactggaagcatcgaaagaaaagggaggagttcgtgccacaggaggaagaattctaa

SEQ ID NO: 666 - DNA, 777 bp, synthetic construct
  source 1..777: mol_type = other DNA
atggctagctccccaaagaaaaagcggaaagtggaagcctcaatggagaaacctcgggtcctggtgctgactggtgctggtattagtgctgaaagcggcattcgcacattccgagccgctgacggactgtgggaggaacacagggtggaggatgtcgccactcccgaaggattcgacagagatcctgagctggtgcaggcattttacaacgccaggagacggcagctccagcagccagaaatccagccaaatgcagcacacctggccctcgctaaactgcaggacgccctcggcgatcggtttctgctcgtgactcagaacattgacaatctgcatgagcgcgctgggaacaccaatgtgatccacatgcatggtgaactgctcaaagtgcgatgcagccagtccggacaggtgctggactggaccggcgacgtcacacccgaggataagtgtcactgctgtcagttcccagcacctctgcgaccacatgtggtctggtttggcgagatgcccctgggaatggacgaaatctacatggctctctctatggcagatatcttcattgctatcggcaccagtggacacgtgtatcctgctgcaggctttgtccatgaggcaaaactgcacggagcccatacagtggagctgaacctcgaaccatcacaggtcgggaatgagttcgctgaaaagtactatggtcctgcaagccaggtggtcccagagtttgtggaaaagctgctcaaagggctgaaggccggttctatcgctgaattctaa

SEQ ID NO: 667 - DNA, 852 bp, synthetic construct
  source 1..852: mol_type = other DNA
atggctagcagccctaaaaagaagaggaaggtggaggcaagcgacatttcaggaggtctggagttcaaaggaatccccgcaaccaatagagtggatgactcccccgtgtctcctaccagtggattcacatatatcaagtccctgatcattgagcctaatgtcatcattccaaaaagctccacaggctgcaactgtcgaggatcatgcactgacagcaagaaatgcgcatgtgccaagctgaacggcggaaatttcccctacgtggacctgaatgatggccgcctcattgagagcagggacgtggtctttgaatgcggaccccactgcggctgtggacctaagtgtgtgaatcgcactagccagaaacgactgaggttcaacctcgaagtgtttcggtccgctaagaaaggctgggcagtccgctcctgggagtatatcccagccgggtctcccgtgtgcgaatacattggtgtggtcaggagaactgctgacgtcgataccatcagcgacaatgagtatatcttcgaaattgattgtcagcagaccatgcagggactgggcggtaggcagcggcgcctcagagatgtggctgtcccaatgaacaatggtgtgagccagtctagtgaggacgaaaacgcccccgagttttgtatcgatgctgggagtacaggcaacttcgcaaggttcatcaatcactcatgcgaacctaacctgttcgtgcagtgtgtcctctcaagccatcaggacatcagactggcacgggtggtcctctttgccgctgataacatttctccaatgcaggagctgacatacgactatggctacgccctggatagtgtgcatgaattctaa

SEQ ID NO: 668 - DNA, 684 bp, synthetic construct
  source 1..684: mol_type = other DNA
atggctagcagccctaagaagaagcggaaagtggaagcctcaatggagttttggggtatcgaagtgaagagcggcaagcccgtgacagtgacaccagaggaaggcatcctgattcacgtgtcacaggccagcctcggcgaatgcaagaacaagaaaggagagttcgtgcctctgcatgtgaaagtcgggaaccagaatctggtcctcggtactctctctaccgagaatatcccacagctgttctgtgacctcgtgttcgataaggaatttgagctgagtcacacctgggggaagggttcagtgtactttgtcgggtataaaacacctaacattgagccacagggttactccgaggaagaagaggaggaagaggaagaggtgccagctggaaatgccgctaaggctgtcgcaaaacccaaggccaaacctgctgaagtgaagcccgcagtggacgatgaagaggacgagtctgacagtgatggcatggatgaagacgattccgacggagaggattctgaagaggaagagcccacccctaagaaacccgcaagctccaagaaaagggccaacgagaccacaccaaaggcccccgtgagcgcaaagaaagccaaggtggctgtcacacctcagaaaactgacgagaagaaaaagggcggaaaggcagccaatcagtccgaattctaa

SEQ ID NO: 669 - DNA, 1026 bp, synthetic construct
  source 1..1026: mol_type = other DNA
atggctagcagccctaagaagaagaggaaggtggaagcaagtatgtcaagagtggtcaaacccaaagtcgcaagcatggaagagatggcagcatttcacaccgacgcttacctgcagcacctccataaggtgtctgaggaaggcgataacgacgatccagagacactggaatacggcctcggatatgactgccccatcactgagggaatctacgattatgccgctgcagtgggcggagcaactctcaccgccgctgagcagctgatcgaagggaaaacaagaattgccgtcaactggccagggggttggcaccatgctaagaaagacgaagcaagcggattctgttacctcaatgatgctgtgctgggcatcctgaagctccgggagaaatttgaccgcgtgctctatgtggacatggatctgcaccatggggacggtgtggaagatgcattctcttttaccagtaaagtgatgacagtctcactgcataaattcagccccggcttctttcctggcaccggagacgtgtccgatatcgggctgggcaagggccggtactattctatcaacgtccccctgcaggacggtattcaggacgataagtactatcagatctgcgagggcgtgctgaaagaagtcttcaccaccttcaaccctgaggcagtggtcctgcagctcggtgcagacaccattgccggcgatcctatgtgcagctttaatatgacaccagagggaatcgggaagtgtctgaaatacgtgctccagtggcagctgcctacactgattctcggcggagggggctaccacctgccaaatactgcccgatgctggacatatctgactgctctcattgtgggaaggactctgagctccgagatccccgaccatgagttctttaccgaatacgggcctgattatgtgctggaaatcactccaagttgtaggcccgacagaaacgatacccagaaggtccaggagatcctccagtcaattaagggaaatctgaaaagggtggtcgaattctaa

SEQ ID NO: 670 - DNA, 963 bp, synthetic construct
  source 1..963: mol_type = other DNA
atggctagctcaccaaaaaagaagagaaaagtggaagcaagcgccagcagaaggacaggggagttcctcagagacgcccaggcaccaagtagatggctgaagcggtctaaaacaggccaggacgatggagctttttgcctggagacttggctcgcaggagcaggtgacgatgcagctggaggagagaggggaagagatcgagaaggtgcagccgacaaggccaaacagcgagaggaaaggagacagaaggagctggaggaaaggtttgaggaaatgaaggtggagttcgaggaaaaagcccagagaatgattgctcggcgcgctgcactgactggcgagatctactctgatggcaagggaagtaagaaaccccgggtccctagcctgccagagaacgacgatgacgctctcattgagatcattatcgaccctgaacagggaatcctgaagtggccactcagcgtgatgtccattcgccagcgaaccgtcatctaccaggagtgcctgcgaagggatctcactgcatgtattcacctgaccaaggtgccagggaaaggtcgcgccgtctttgccgctgacacaatcctgaaggatgacttcgtggtcgagtataaaggcgaactctgtagtgagagagaagccagggagagagaacagcggtacaaccgctcaaaggtgcccatggggagcttcatgttctacttcaagaacggttcacgcatgatggctatcgatgcaacagacgagaagcaggacttcggacccgctcgactgattaaccactccagacggaaccccaatatgacccctagagcaatcacactgggggattttaactctgagcctcggctcattttcgtggcccgccgaaatatcgaaaagggcgaggaactgctcgtggactatggcgagagggaccccgacgtcatcaaagaacatccctggctgaatagcgaattctaa

SEQ ID NO: 671 - DNA, 1035 bp, synthetic construct
  source 1..1035: mol_type = other DNA
atggctagctcacccaaaaagaaaagaaaagtcgaggcatcctacaaagaaagcgtccacctggagacatacccaaaagaaagagccactgagggaatcgcaatggagattgactacgcctcttgcaagagactgggcagctcctaccgggctctgcctaagagttatcagcagccaaaatgcaccggaagaacacccctctgtaaggaggtgctgaacgacacctgggtcagcttcccttcatggagcgaagattccacctttgtgtctagtaagaaaacacagtacgaggaacacatctatcggtgtgaggacgaacgcttcgagctggatgtggtcctcgaaactaacctggccaccatccgggtgctggaggctattcagaagaaactgagtcgcctctcagctgaggaacaggcaaagtttcgactcgacaatacactgggcggaacttccgaagtgatccatcgaaaggctctgcagaggatctacgcagataaagccgctgacatcattgatgggctgaggaagaatccatctatcgcagtgcccattgtcctgaaaagactcaagatgaaagaggaagagtggagggaggcccagagaggcttcaacaaggtctggagggagcagaatgaaaaatactatctgaagagcctcgaccaccagggaatcaacttcaagcagaacgatactaaggtcctgcggtccaaatctctgctcaacgagatcgaatcaatctacgacgagcgccaggaacaggccaccgaagagaatgctggggtgcccgtcggtcctcatctgagtctcgcttatgaggacaagcagatcctcgaagatgcagccgctctgatcattcaccatgtgaagcgacagacaggcatccagaaagaggacaagtacaaaatcaagcagattatgcaccatttcattccagatctgctctttgcccagcgcggggacctgtccgatgtggaagaggaagaggaagaggaaatggacgtggatgaggcaactggtgccgtcgaattctaa

SEQ ID NO: 672 - DNA, 678 bp, synthetic construct
  source 1..678: mol_type = other DNA
atggctagctcccccaagaagaaaaggaaggtggaagcatcatcatgtgactcaaccaacgcagcaatcgcaaagcaggcactcaagaagcccatcaagggtaaacaggccccccgcaagaaagctcagggcaagactcagcagaaccgaaaactgaccgacttctaccctgtgaggagaagctcccggaagtcaaaagccgagctgcagagcgaggaacggaagcgcatcgatgagctcattgaaagcggcaaggaggaaggcatgaaaatcgacctgattgatggcaagggaagaggggtcatcgcaaccaaacagttctctcggggagactttgtggtcgagtatcacggggacctgatcgaaattacagatgccaagaaacgggaggcactctacgcacaggacccctccacaggatgctatatgtactatttccagtacctgtctaagacttattgtgtggatgctacccgcgaaacaaatcgactgggaaggctcatcaaccatagtaagtgcgggaattgtcagaccaaactccacgacatcgatggcgtcccacatctgatcctcattgcatccagggatattgccgctggcgaggaactgctctacgactatggcgatagatctaaggctagtattgaggcatttccctggctgaagcacgaattctaa

SEQ ID NO: 673 - DNA, 330 bp, synthetic construct
  source 1..330: mol_type = other DNA
atggctagcagtcctaagaagaagcggaaggtggaagccagtatgtcaaggcggaagcaggcaaagccccagcattttcagtcagacccagaagtcgcttccctccccaggagagacggcgataccgagaagggacagccatctcggcccacaaagagtaaagacgcacacgtgtgcgggaggtgctgtgccgagttctttgaactgtcagatctgctcctgcataagaaaagctgtactaagaaccagctcgtgctgatcgtcaatgaaagccctgcctccccagctaaaaccttcccccctggccctagtctgaacgacgaattctaa

SEQ ID NO: 674 - DNA, 909 bp, synthetic construct
  source 1..909: mol_type = other DNA
atggctagcagcccaaagaagaaacggaaggtggaagcctcagtgcaggtgaaaagggtgctggaaaaatcccccggcaaactcctcgtgaagatgcccttccaggcttcccctggcggaaaaggtgaagggggtggcgcaaccacatctgcccaggtcatggtcatcaagcgacctggaaggaaaagaaaggccgaggctgaccctcaggccattccaaagaaacggggacgcaagccagggtccgtggtcgcagctgcagcagctgaggctaagaaaaaggcagtgaaggaaagctccatccgcagtgtgcaggagactgtcctgcccatcaagaagaggaagactagggagaccgtgtccatcgaggtcaaagaagtggtcaagcccctgctcgtgtccaccctgggcgaaaaatctggaaaggggctcaaaacatgcaagtcacctggacggaaaagcaaggagtctagtccaaaggggcgctcaagctccgcttctagtccccctaaaaaggaacaccatcaccatcaccatcacgccgagtctcctaaggctcctatgccactgctcccaccacctccaccacctgagccacagtcaagcgaagaccccatcagcccacccgagcctcaggatctgtcctctagtatttgcaaagaggaaaagatgcccagagcaggcagcctggagagtgatggctgtccaaaagaacccgccaagacccagcctatggtggcagccgctgcaactaccaccacaaccacaactaccacagtggccgaaaaatacaagcatcgcggcgagggcgaacgaaaggacattgtgtcaagctccatgcccagacctaaccgggaggaaccagtcgatagtaggacacccgtgactgagagagtctcagaattctaa

SEQ ID NO: 675 - DNA, 258 bp, synthetic construct
  source 1..258: mol_type = other DNA
atggctagctcccccaagaaaaagagaaaggtggaagcaagtatgaacgggctgatggaggacccaatgaaagtctacaaggacaggcagtttatgaacgtgtggaccgaccacgagaaggaaatcttcaaggataagttcatccagcatcccaaaaatttcggcctgatcgccagctacctggagaggaagtccgtgcctgactgcgtcctgtactattacctcacaaagaaaaacgaaaattacaaagaattctaa

SEQ ID NO: 676 - DNA, 360 bp, synthetic construct; identical to SEQ ID NO: 650
  source 1..360: mol_type = other DNA

SEQ ID NO: 677 - DNA, 1287 bp, synthetic construct
  source 1..1287: mol_type = other DNA
atggccaagaccgtggcctatttctacgaccccgacgtgggcaacttccactacggagctggacaccctatgaagcctcatcgcctggcattgacccatagcctggtcctgcattacggtctctataagaagatgatcgtcttcaagccataccaggcctcccagcatgacatgtgccgcttccactccgaggactacattgacttcctgcagagagtcagccccaccaatatgcaaggcttcaccaagagtcttaatgccttcaacgtaggcgatgactgcccagtgtttcccgggctctttgagttctgctcgcgttacacaggcgcatctctgcaaggagcaacccagctgaacaacaagatctgtgatattgccattaactgggctggtggtctgcaccatgccaagaagtttgaggcctctggcttctgctatgtcaacgacattgtgattggcatcctggagctgctcaagtaccaccctcgggtgctctacattgacattgacatccaccatggtgacggggttcaagaagctttctacctcactgaccgggtcatgacggtgtccttccacaaatacggaaattacttcttccctggcacaggtgacatgtatgaagtcggggcagagagtggccgctactactgtctgaacgtgcccctgcgggatggcattgatgaccagagttacaagcaccttttccagccggttatcaaccaggtagtggacttctaccaacccacgtgcattgtgctccagtgtggagctgactctctgggctgtgatcgattgggctgctttaacctcagcatccgagggcatggggaatgcgttgaatatgtcaagagcttcaatatccctctactcgtgctgggtggtggtggttatactgtccgaaatgttgcccgctgctggacatatgagacatcgctgctggtagaagaggccattagtgaggagcttccctatagtgaatacttcgagtactttgccccagacttcacacttcatccagatgtcagcacccgcatcgagaatcagaactcacgccagtatctggaccagatccgccagacaatctttgaaaacctgaagatgctgaaccatgcacctagtgtccagattcatgacgtgcctgcagacctcctgacctatgacaggactgatgaggctgatgcagaggagaggggtcctgaggagaactatagcaggccagaggcacccaatgagttctatgatggagaccatgacaatgacaaggaaagcgatgtggagatttaa

SEQ ID NO: 678 - DNA, 402 bp, synthetic construct
  source 1..402: mol_type = other DNA
atgggctccggaatgaacattcagatgttgctcgaggctgctgattacctggagcgccgcgaacgggaagcggaacacggttacgctagtatgctgcctgggagcggcatgaatatccagatgctgctcgaggcggccgattatctcgaacgcagagagagagaagccgaacatggctacgcctctatgctgcctggctccgggatgaatatacagatgctcctggaagctgccgactatctggagcgaagagaaagggaggctgagcacgggtatgcaagtatgctccctggctccggtatgaatatccagatgctgctggaggccgctgactatcttgaacgccgagaaagggaagccgagcatggatatgcatccatgctgccttctaggtctgcctaa

SEQ ID NO: 679 - DNA, 2298 bp, synthetic construct
  source 1..2298: mol_type = other DNA
ccggccatctttaaacccgaggagctacgccaggcacttatgccaactctagaagcactctatcgacaggacccagagtctttgccttttcgtcagcctgtagatcctcagctcctaggaatcccagattattttgatatagtgaagaatcctatggacctttctaccatcaaacgaaagctggacacagggcaatatcaagaaccctggcagtatgtggatgatgtctggcttatgttcaacaatgcgtggctatataatcgtaaaacgtcccgtgtatataaattttgcagtaaacttgcagaggtctttgaacaagaaattgaccctgtcatgcagtctcttggatattgctgtggacgaaagtatgagttctccccacagactttgtgctgttacggaaagcagctgtgtacaattcctcgtgatgcagcctactacagctatcagaataggtatcatttctgtgagaagtgtttcacagagatccagggcgagaatgtgaccctgggtgacgacccttcccaacctcagacgacaatttccaaggatcaatttgaaaagaagaaaaatgataccttagatcctgaaccttttgttgactgcaaagagtgtggccggaagatgcatcagatttgtgttctacactatgacatcatttggccttcaggttttgtgtgtgacaactgtttgaagaaaactggcagacctcggaaagaaaacaaattcagtgctaagaggctgcagaccacacgattgggaaaccacttagaagacagagtgaataagtttttgcggcgccagaatcaccctgaagctggggaggtttttgtcagagtggtggccagctcagacaagactgtggaggtcaagccgggaatgaagtcaaggtttgtggattctggagagatgtcggaatctttcccatatcgtaccaaagcactctttgcttttgaggagatcgatggagtcgatgtgtgcttttttgggatgcatgtgcaagaatacggctctgattgccccccaccaaatacaaggcgtgtatacatatcttatctggacagtattcatttcttccggccccgctgcctccggacagctgtttaccatgagatcctcatcggatatctcgagtatgtgaagaaattggggtatgtgacaggacatatttgggcctgtcccccaagtgaaggagatgactatatctttcattgccacccccctgaccagaaaatccccaaaccaaaacgactacaggagtggtacaagaagatgctggacaaggcgtttgcagagaggatcattaacgactataaggacatcttcaaacaagcgaacgaagacaggctcacgagtgccaaggagttgccctattttgaaggagatttctggcctaatgtgttggaagaaagcattaaggaactagaacaagaagaagaagaaaggaaaaaagaagagagtactgcagcgagtgagactcctgagggcagtcagggtgacagcaaaaatgcgaagaaaaagaacaacaagaagaccaacaaaaacaaaagcagcattagccgcgccaacaagaagaagcccagcatgcccaatgtttccaacgacctgtcgcagaagctgtatgccaccatggagaagcacaaggaggtattctttgtgattcatctgcatgctgggcctgttatcagcactcagccccccatcgtggaccctgatcctctgcttagctgtgacctcatggatgggcgagatgccttcctcaccctggccagagacaagcactgggaattctcttccttacgccgctccaaatggtccactctgtgcatgctggtggagctgcacacacagggccaggaccgctttgtttatacctgcaatgagtgcaaacaccatgtggaaacacgctggcactgcactgtgtgtgaggactatgacctttgtatcaattgctacaacacaaagagccacacccataagatggtgaagtgggggctaggcctagatgatgagggcagcagtcagggtgagccacagtccaagagcccccaggaatcccggcgtctcagcatccagcgctgcatccagtccctggtgcatgcctgccagtgtcgcaatgccaactgctcactgccgtcttgccagaagatgaagcgagtcgtgcagcacaccaagggctgcaagcgcaagactaatggaggatgcccagtgtgcaagcagctcattgctctttgctgctaccacgccaaacactgccaagaaaataaatgccctgtgcccttctgcctcaacatctaa

SEQ ID NO: 680 - DNA, 567 bp, synthetic construct
  source 1..567: mol_type = other DNA
atgaggcctcacaccttgaatagcaccagcacttcaaagtcatttcagagcacagtcactggagagctgaatgcaccctacagtaagcagtttgtccactccaagtcatcacagtaccggagaatgaagactgaatggaaatctaatgtgtatctggcccgatctcggatccagggactgggcctgtatgctgctagagacattgaaaaacacactatggtcatcgagtacattggaacaattattcgaaatgaggttgcaaaccggaaggagaagctttatgagtctcagaaccggggtgtgtacatgttccgcatggacaatgaccacgtgattgacgccacactcacaggagggcctgcaagatacatcaaccactcctgtgcccctaactgtgtggctgaagtcgtgacctttgagagaggacacaagattatcatcagctccaaccggaggatacagaaaggagaagagctctgctatgattataagtttgactttgaagatgaccagcacaagattccgtgtcactgtggagcggtgaactgccggaagtggatgaactaa

SEQ ID NO: 681 - DNA, 2871 bp, synthetic construct
  source 1..2871: mol_type = other DNA
accccagtgaatgcaactgtgggaactgtaaacgcggcccctggcacggtgaacgccgcagcttctgctgtgaacgctaccgcaagtgcagttactgtgaccgccggagccgtcacagccgccagcggaggagtaactgccaccactggcacggtgacaatggccggcgccgtgatcgcaccgagcacaaagtgtaaacaaagggccagcgcaaacgaaaactcaaggttccaccccggttccatgccagtgatcgatgatcggcccgctgacgcggggtctggcgcgggattgagggtcaatacttccgagggtgtcgttctgttgagctactctgggcaaaagaccgaaggcccacaacggatttccgctaaaatctctcaaattccaccagcctctgcaatggacatcgagttccaacagtccgttagcaaaagtcaggtcaagccagattccgtgacggcttctcagccaccttctaaaggcccacaggcccccgccggctatgccaatgtagccacacacagcacactcgtgttgacagctcagacttacaacgccagccctgtgatctctagcgtgaaagcggatcgaccgtctctcgagaaaccggagccaatacacctctctgtaagcacacccgtcactcagggcggcacagtgaaggttttgacccagggaattaacaccccacctgttctggtccacaatcagctggtcctcactccctctatcgtgactactaataagaagctggcggacccagttaccctgaaaatcgagacaaaagtgctgcagcctgccaacctcgggagcactcttacgcctcatcacccaccggctctgccctccaagctccccaccgaggtcaatcatgttccctctggacctagtatcccggctgatcgcacggtcagtcatctggcggccgcaaagctggatgcacacagccccagaccaagtggtccgggtcccagctccttccccagggctagccacccctcctctactgcatctacagctctgtctactaatgccactgtcatgctggccgctggtataccggtccctcagtttattagctctattcatcctgagcagtctgttatcatgcctcctcacagcatcacacagaccgtgagtctctctcacctcagtcagggtgaggtcagaatgaacacaccgaccttgccttccatcacttactcaatcaggccagaagcactgcactcccccagggctcctcttcagcctcagcagattgaagtccgagcaccacagagagcgagcaccccccaacccgcacctgcgggcgtgcctgcactggccagccaacatcctcccgaggaggaggtgcattatcatttgcccgtggctcgcgccacagcaccggtccaaagcgaagtcctggtcatgcagagcgagtatcgcttgcatccctataccgtgccacgggacgttagaattatggtgcacccccatgtgactgctgtaagcgaacaaccccgggctgctgatggcgtggtgaaggtacctcccgcatctaaggccccccagcagccagggaaagaggctgccaagacgcctgacgcaaaggcagcccccaccccaacgcctgctcccgtccccgtgccggttcccctgccagctcccgctcctgctccccatggtgaagccaggatccttactgttacaccatccaaccaactgcaaggcttgccgctgacaccacccgtagtggtgacccacggagtacaaattgtgcacagttcaggtgaactgtttcaggaataccgatacggtgacattcggacttaccatccccctgctcagttgacccacacacagtttccagcggccagctctgtaggactcccatcacggactaagacagcagcccaaggacctccacccgagggggaacccctgcagcccccacaaccagtacagtctacgcagccagctcaaccagcccccccttgcccaccatctcagttggggcaacccgggcagcccccctctagcaaaatgccacaggtttctcaggaggcaaaaggcacacagacaggggtcgagcagccgcgattgcccgctggtcccgccaaccgacctccggaaccccacacacaagtgcagcgggcccaagctgaaaccggaccgactagcttcccttcccctgttagtgtgtccatgaaaccagaccttcctgtttcattgcccacccagactgcacccaagcagcccctgtttgttccaacgaccagtggccctagcacaccacccggtcttgtcctgccgcatacagaatttcagcctgctccaaagcaagactcctcccctcatctcacttctcagaggcccgtcgacatggtccagctgctcaagaaataccctattgtgtggcaaggacttctcgccctgaagaacgataccgccgccgtacagctgcattttgtgagtggaaacaacgtccttgcccataggtcccttcctctgtctgaaggagggccacccctcagaatcgcacagcgcatgagactcgaagccacgcagctggagggcgtcgcccgccggatgacggtggagactgattactgtctgcttctggccctcccatgcggacgagatcaggaagacgtggtctcccagaccgagtcactcaaagccgccttcataacatatctgcaggcgaaacaggcggccggaatcataaatgtcccaaatccaggcagcaatcagcctgcctatgtactgcagatattccctccctgcgagttctcagagtcacatctgtcaaggcttgctccagacctgttggccagcatttccaatattagcccacacctcatgatcgtgattgcaagtgtctaa

SEQ ID NO: 682 - DNA, 1737 bp, synthetic construct
  source 1..1737: mol_type = other DNA
gaagatggtctctccagccagctgaaaagtgatcctgttgatcccgataaggagccagagaaggaggatgtcagcgcaagtggcccgtctcccgaggccactcagttggctaagcagatggagcttgagcaggcagtagagcacattgctaaactcgctgaagcaagcgcatctgcggcctacaaagccgatgcccctgaaggacttgcaccagaggacagagacaaaccggcacatcaagcctcagagacagagctggctgctgccattggctctataatcaacgatatttcaggtgaaccagaaaatttcccagccccacccccgtacccgggagaaagtcagacggacctgcagccaccagctggagcacaggctctccagccaagtgaggagggaatggagactgacgaggctgtcagcggtatcctggagacagaggctgccacggaatcatccaggccacccgtcaacgccccggacccatctgctggcccaaccgatactaaagaagccagagggaacagcagcgaaaccagccattccgtgcctgaagccaagggaagcaaagaagttgaagttactctggtgcggaaagacaaaggccggcaaaagactacccgctcccggcggaagcggaatactaataaaaaggtggtcgcccccgttgagtcacatgtgccagagagcaaccaggctcagggtgaatccccggccgcaaatgaggggacaaccgtccaacacccggaggccccccaggaagagaagcaatctgagaaaccccacagtacccctcctcaatcctgcacgtctgatctgtctaaaattcctagtactgaaaactccagccaggaaatttctgtcgaagaaagaacaccaactaaggcgagtgtgccccccgacctgccgccgcctccgcagccggccccggtggacgaggaacctcaggccagatttagggtgcactctatcattgagagtgacccagttaccccgccatcagatccatccattccaatacctacacttccatctgtgaccgccgcgaagctgtcacctccggtggcatccggcggcataccccaccagtccccacctacaaaagttaccgagtggatcacaagacaggaggaaccgcgagcacagtctaccccctccccagccctgccccccgacacgaaagcctctgacgtggacaccagttcatctacgctgagaaaaattttgatggatccgaagtacgtctctgccaccagcgtcacttctacaagcgtgaccactgcgatcgcagagcccgtgagcgcggcaccatgccttcatgaagccccgcccccccccgtcgattctaaaaagccactcgaggagaagactgcgcccccagtgacaaacaattcagaaattcaggcgtcagaggtgctggtcgctgccgacaaggagaaggtcgcaccagtgatagccccaaagataacaagcgttatcagtcgcatgccagtttctatcgatctggagaatagtcagaagatcaccctggccaagcctgccccacagaccctcactggtctcgtctccgccctgaccggcttggtgaatgtctctctcgtccctgtgaatgcactgaagggacctgttaagggcagcgttacgacattgaaatcactggtgagcacgcctgctggtcctgttaatgtgttgaagggccccgtgaacgtccttactggaccagtgaacgtgctgtaa

SEQ ID NO: 683 - DNA, 2322 bp, synthetic construct
  source 1..2322: mol_type = other DNA
atggaacctggcaatggctccctcgatctcgggggggactcagccggcaggagcggagccggcctggagcaggaagctgctgctggcggcgacgaggaagaagaggaggaggaggaagaggaagaaggcatcagcgctttggatggcgatcaaatggagctgggagaagagaacggtgctgccggggccgcagacagcggccctatggaagaggaggaggctgcctccgaggacgaaaacggggacgaccaagggttccaggaaggcgaggacgagctgggcgacgaagaagagggcgccggggatgagaatgggcatggggaacagcagccgcaaccgcctgcgacccaacagcagcaaccacaacagcagagaggcgcagcaaaggaagccgccggtaaatcctctggccccactagtctgttcgcagtcactgtggccccaccaggtgcccggcagggccagcagcaggccgggggcaagaagaaggctgagggcggaggcggaggtggaagacctggagcccctgccgcaggcgatgggaagacagagcagaaaggcggcgataaaaagagaggggtgaagcggcccagggaagaccatggaagaggatatttcgaatatatagaggaaaataagtattccagggcaaaatcccctcaacctccggttgaggaggaagacgagcacttcgatgacacggttgtctgtttggacacctataattgcgacctccactttaagatctcacgggatagactcagcgcctctagtcttaccatggagagcttcgctttcctgtgggcaggtggtagggcctcttatggtgtaagcaaaggtaaagtgtgcttcgagatgaaagtgacagaaaagattcccgttcgccacctgtacaccaaggacatcgacatccacgaggtccgcattggttggtcccttactacatcaggcatgctgctcggagaggaagagttttcttatggttactcactgaagggaattaaaacttgcaattgcgagacagaggactatggcgagaagttcgacgagaacgacgtgatcacatgcttcgcgaacttcgaaagtgatgaggtcgaactctcttacgctaagaatggccaggaccttggtgtggcatttaaaatcagcaaagaggtcctggcagggcgccctttgtttccgcacgtcttgtgtcataattgcgccgttgagttcaatttcggccaaaaggagaaaccctatttccccattccggaggagtacactttcatccagaatgttcccctggaagaccgcgttagaggtccgaagggccccgaagagaaaaaagattgcgaagtggtgatgatgatcgggcttcctggtgctggtaagactacttgggtcaccaagcacgctgcagagaatccaggcaaatacaacatcttggggaccaacactatcatggacaagatgatggtcgcagggttcaagaagcaaatggccgacaccgggaaactgaacaccctcctgcagcgggctcctcagtgcctcgggaagtttatagagatcgcggctcgaaagaaaagaaatttcatcctggaccagaccaacgtgtctgctgccgcccagagaaggaagatgtgcctcttcgcaggcttccagcggaaagcagttgtcgtgtgtccaaaggatgaggattataagcagagaacacagaagaaggctgaagtggaaggcaaagatctgcctgaacacgccgtcctgaagatgaaaggaaactttaccttgcccgaggttgccgagtgtttcgacgagattacttacgtggagcttcaaaaggaggaggcacagaagctgctggagcaatacaaagaagagagtaagaaggccctgcctcccgagaaaaagcagaacactggctcaaagaagtctaataagaacaagtctggtaagaatcagtttaaccgcggtggcgggcataggggccggggtgggtttaatatgcgagggggaaactttcgaggaggagcgccaggcaaccgcggtggctataatcggcgaggtaacatgcctcagcggggcggaggcggaggaggttcaggtgggatcggctatccctaccctcgcgcccctgttttccccggaagaggtagctactcaaatagaggcaactacaatcggggggggatgccaaatcggggcaattataaccagaattttcgggggcggggtaacaataggggatataagaatcaatctcagggttacaaccagtggcaacagggccaattctggggccagaagccatggtcccagcactatcatcaggggtactattaa

SEQ ID NO: 684 - DNA, 636 bp, synthetic construct
  source 1..636: mol_type = other DNA
atgcccagcagaaaattcgcggatggagaggtagtacgcgggagatggcctggctcatcactctattacgaggtggaaattctcagtcacgacagcacttcccagctttataccgtcaagtataaagacggaacggagctggagttgaaggaaaacgacatcaaacctctgacatcttttcggcaaaggaaaggcgggagtacaagttcctctccttcccggagacgcggatcccggagtaggtcaagaagtcggtcccctggtcggcctccgaagagcgcacgccgctcagcatctgccagccatcaggcagacattaaggaggcaaggcgcgaggtagaagttaaactgactcctttgatccttaagcctttcgggaacagcatatcccgctacaatggagagccagaacacatcgaaaggaatgacgctccacataagaatactcaggaaaaatttagtctgtcccaagaaagttcatatatcgcgacacagtatagtctccggccgcgacgggaagaagttaaattgaaagagattgatagcaaggaagagaagtatgttgcgaaggagctcgctgtccggacgtttgaagtaacgcctattcgggccaaggatctggagtttggtggataa

SEQ ID NO: 685 - DNA, 1848 bp, synthetic construct
  source 1..1848: mol_type = other DNA
atgcccagtcgcaaatttgccgatggcgaagtggtgcggggaagatggcccggaagttctctgtactatgaggtggaaatcctgagccacgattccaccagtcagctgtacaccgtcaagtataaagatggcaccgagctggaattgaaggagaatgatatcaagcctcttacatcttttcggcagagaaaggggggatcaacttctagctcccccagtcgccgacgcgggtcacggtccaggagtcgcagtcgcagccctggtagaccacccaagagcgctcgcagatccgcaagtgcaagccaccaggctgacataaaggaggcaagacgcgaggtggaggtgaagttgaccccactgattctcaaaccgttcgggaatagcataagtcgatataatggcgagcccgagcatatcgagcggaacgacgcccctcacaagaatacgcaggagaagttctccctctcccaagagtcctcctatatcgctacccagtatagccttaggccgaggcgggaggaggtcaagctgaaagagatagacagtaaagaggagaagtacgtggcgaaggaactcgcagtgagaactttcgaggtgacaccaatccgagccaaggatctggaattcgggggggttccgggagttttccttataatgtttggattgcccgtatttctgttcttgttgctgctgatgtgtaagcagaaggacccatctctgcttaatttcccccctccgcttcctgccctctacgaactctgggaaacccgagtcttcggagtctacctcctctggtttctcatccaagtgttgttttatttgctgcccataggaaaagttgtggagggaacacccctgatcgatggtcgcagactgaaatatagactgaacggcttttatgccttcatcctcaccagcgccgtcattgggaccagtctgttccagggagtggagtttcactacgtgtactcccactttttgcagtttgctttggcagctactgtcttctgtgtggtccttagtgtctatctttacatgaggtctcttaaagcccctcgcaacgacctctcaccagcttctagtggtaatgctgtgtacgattttttcatcggaagggagctgaatcctcgcatcgggacctttgacctgaagtacttctgcgagctgaggccgggtctgatcgggtgggtggttatcaacctggttatgcttttggcagagatgaagatacaggatagggccgtaccctccctggctatgatactcgtaaacagttttcagctcctgtatgtggtggacgccctttggaacgaagaggccttgctgacaactatggacatcatacacgacggctttggattcatgctggcattcggtgacctggtctgggtgccttttatatattctttccaggccttttacctggtatcacacccaaatgaggtttcttggcccatggctagccttatcatcgtccttaagctgtgcggatacgtaatcttcaggggcgccaactcacagaaaaatgcatttcgcaaaaatccatctgacccaaagctcgcccatcttaagaccattcacacatccaccgggaagaacctcctggtttccggttggtgggggtttgtccgccaccctaactacttgggcgacctcataatggcgctggcttggagtctcccctgtggattcaaccacattctgccctacttctacataatatattttaccatgcttctggtgcacagggaggcacgcgatgaataccattgcaagaaaaagtatggtgtagcgtgggagaaatactgtcagcgggtgccgtacaggattttcccgtacatatattaa

SEQ ID NO: 686 - DNA, 828 bp, synthetic construct
  source 1..828: mol_type = other DNA
atgggaaacttgatgatcagctttctgaagaaagatacgcagtcaattacactcgaagaactggccaagattatcaaaaagtgcaagcatgtcgtcgccctgacaggctctggcacaagcgcagagtccaatatccccagcttccgaggctcttcaaactctatctggagcaagtacgaccccagaatctacggaacaatttggggtttttggaagtatcccgagaaaatttgggaggtgataagagatatctcatcagattatgagatcgaaataaacaatggtcacgtggcccttagcaccctcgaaagcctgggttacctcaaaagcgtggttacccagaacgtcgacggactgcatgaggcatccgggaacactaaggtaatcagcctgcatggcaatgtgttcgaggccgtgtgctgcacgtgtaacaaaatagtgaagctcaacaaaatcatgcttcaaaagacatctcatttcatgcatcagctcccacctgagtgcccatgcggcgggatatttaagcccaatatcattctttttggagaggttgtctcttctgacctcctcaaagaagcggaagaagagatcgcaaaatgcgacctgctgctggtgattgggacctcatccacagtaagtacggcgaccaatctgtgccatttcgcctgcaagaagaaaaagaaaattgtggaaatcaatatcagcaagacctatatcaccaacaaaatgtcagactatcacgtatgtgcaaagtttagcgagttgaccaaggtggccaacatcctcaagggcagcagtgagaagaataaaaagattatggaattctaa

SEQ ID NO: 687 - DNA, 996 bp, synthetic construct
  source 1..996: mol_type = other DNA
atggcggccgctgcgaactcaggctcctcactgcccctgtttgactgccctacatgggctggtaagcctcccccaggtttgcacctcgacgtggtgaagggcgacaagctgatcgagaagctgataatcgatgagaaaaaatattatctcttcggtagaaatcctgatctctgtgactttactatcgatcatcagtcttgctcacgagtacacgccgctcttgtctaccacaaacacctcaaacgcgtctttctcatcgacctgaatagtacccacgggacatttcttggtcacattcggctcgagccacataaaccacagcagattcccatagactctacagtgagttttggggcttccacacgggcctacacgctgagagaaaagcctcagaccctgccatccgcagtgaagggcgatgaaaagatgggcggcgaggatgacgagctgaaaggactgcttgggctccccgaggaggagacggagctcgacaatctgaccgagtttaacacagcccataacaaaaggatctccacacttacaatagaagaggggaatctggacatccagcgacccaagcggaaaaggaaaaatagtagagtgacattctccgaagacgatgagatcataaatcctgaggatgtggatccatccgtgggacgcttccgaaacatggttcagacggctgtcgtgccggtcaagaagaaacgcgtggagggtccggggtctttggggttggaagaatcaggtagcagacgcatgcagaatttcgcattctctggaggactgtacggcggacttccaccgacccattcagaagccggaagtcagccccacgggattcatggtactgcactgatcggcggtctgcctatgccttacccaaacttggcacctgacgtggacctgactcccgtagtaccatcagccgtaaacatgaaccccgcccccaaccctgccgtctacaaccctgaagctgtgaatgaagagttttaa

SEQ ID NO: 688 - DNA, 1014 bp, synthetic construct
  source 1..1014: mol_type = other DNA
atggaaaacagagctctggacccgggcactagagactcctatggcgctacgtcacatctgccaaacaaaggagcactggcaaaggtgaagaacaactttaaagacctcatgtcaaaactcactgaaggtcagtacgtgctgtgtaggtggacggatgggctgtactatctcggtaaaatcaagagagtgtccagctccaagcagagctgcctggtcacattcgaggataattccaagtactgggtactgtggaaagacattcagcacgctggagttccaggcgaagaaccgaaatgtaacatttgtctggggaaaacgtctggtccgctgaacgaaattctcatctgtggtaaatgtgggctgggttaccaccagcagtgccatatccctatcgcagggagtgcggaccagcccctgcttactccctggttctgccgcaggtgtatctttgctctggccgtcagaaaggggggggccctgaaaaagggggccattgctcgcactttgcaggcggtaaagatggtgctgagctaccagcctgaagagctggaatgggatagcccgcaccgcaccaatcagcagcaatgctactgttactgtggcgggcccggagaatggtatctgcgcatgcttcagtgttatcggtgtcgacagtggtttcacgaggcttgtacacagtgccttaatgaacctatgatgttcggtgaccggttttacttgtttttttgtagtgtctgtaaccagggacctgggggaagtggtagcgactctagcgccgaaggcgcctcagtgcctgaaaggcctgacgaggggatcgatagtcacacgtttgagagcatcagcgaggatgatagctccctttcccacttgaagagcagtataactaattatttcggtgccgcggggcggttggcctgtggggaaaaataccaagtgctggcacggcgcgtcacacctgaaggaaaggtccaatatctggtagaatgggaggggacaacaccctacgaattctaa

SEQ ID NO: 689 - DNA, 366 bp, synthetic construct
  source 1..366: mol_type = other DNA
atgttcaatgatagagtgatagtcaagaagagccccctgggaggatacggggtgtttgcccgcaagagctttgagaagggtgagcttgttgaggagtgcctgtgcatcgtgcgccacaatgacgactgggggaccgccctggaggactacttgttttcacggaaaaatatgagtgcaatggcactcggcttcggtgccatctttaatcacagcaaggaccctaatgctcgccacgagctgactgccggacttaagcggatgcgcattttcactatcaagcctattgccataggagaagaaataacaatttcctatggagacgattattggctgtcacgaccgagactgacccagaatgagttttaa

SEQ ID NO: 690 - DNA, 735 bp, synthetic construct
  source 1..735: mol_type = other DNA
atgaaggtcgccgcgaaaaaacttgccacctcccgcatgcggaaagaccgcgcagctgctgcatccccttcctccgatatagaaaactctgagaaccccagctcacttgcttcccactcctccagctctggaagaatgaccccttcaaaaaatactcggagtcgcaaaggggtaagtgtgaaagatgtcagtaaccataaaatcacggaattctttcaggtcagaaggagtaaccggaagacctctaagcagatttccgatgaggctaaacatgccttgcgagacacggtgttgaagggaacaaatgaaagacttcttgaagtgtacaaggacgtggttaaaggaaggggaatcaggacgaaagtgaattttgagaagggtgatttcgtggtggaataccgcggtgttatgatggagtatagcgaggctaaagttatcgaggaacagtacagtaacgatgaggagatcgggagctatatgtattttttcgagcacaacaacaaaaagtggtgtatcgatgcaaccaaagaatctccatggaagggcagactcataaaccattctgtccttcgccccaacctcaaaacaaaagtggtagaaatcgatggtagtcatcacctcatcctggttgcacgcagacagattgcgcagggagaagagctcctgtacgattatggtgaccgcagcgccgagactatcgccaaaaatccctggctggttaacacagaattctaa

SEQ ID NO: 691 - DNA, 894 bp, synthetic construct
  source 1..894: mol_type = other DNA
gtgcggacagagaaaatcatatgccgggacgtagccagagggtacgagaacgtacccattccgtgcgtaaacggcgtggacggcgaaccatgccctgaggactacaagtacataagcgagaattgtgagaccagtactatgaatattgatagaaacatcacacatctccagcattgtacctgtgttgatgattgttcctcttccaactgtctttgtggccaactcagcatcagatgttggtacgacaaggacggcaggctgcttcaagaattcaacaaaatcgaaccccccctgattttcgaatgcaatcaggcttgttcatgttggcggtcatgcaagaatcgggttgtgcaatccgggattaaagttcggttgcagttgtaccgcactgcaaagatggggtggggcgttcgggcactgcaaaccatcccgcagggaacctttatatgtgaatatgtgggagagctcatctcagatgctgaagccgacgtgcgcgaagacgactcctacctgtttgatctggataacaaggacggagaagtttactgtattgacgcccggtactacggcaacattagtagattcataaatcacctgtgtgatcccaacatcatccccgtacgcgtgtttatgctgcaccaggacctcagattcccacgaatcgccttcttcagtagcagggatattaggaccggggaagaacttggctttgactatggagatcggttctgggacatcaagtcaaagtatttcacctgccagtgtgggagcgagaaatgcaaacactctgctgaagccatagctctggagcagtctcgcctggctcgcctggacccacatcccgaactgctccctgacctgtccagcctgccgccaattaacaccgaattttaa

SEQ ID NO: 692 - DNA, 831 bp, synthetic construct
  source 1..831: mol_type = other DNA
tctagttctatggctgacttcagaaagtttttcgcgaaggctaaacacatcgtcatcatatccggggctggagtgtccgccgagtcaggcgtacctacctttcggggcgccggcggctactggcgcaaatggcaagcacaagacctcgccacaccgcttgcctttgcccataaccccagccgggtgtgggagttttatcactaccgaagggaagttatgggttccaaggagccaaacgcaggacatagagctatcgccgagtgtgaaactagacttggaaagcagggccggagggtggtcgtgattacacagaacatcgacgagttgcatcgcaaggcagggaccaagaacttgctggaaatacacggtagcttgtttaaaacaagatgcacctcatgtggtgtggtggccgagaactacaaaagcccaatttgtccagccctgtccggcaagggggctcctgagcccggtacacaggatgcgagcataccggtggaaaagctgccacgctgtgaggaggccggctgcggcggactcctccgcccccacgttgtctggttcggagagaatctggacccagctattctggaggaggtggatagagaactggcccattgcgacctgtgcctggtcgtcggcacgtcttcagtcgtgtacccagccgccatgtttgctcctcaggtcgccgccagaggcgtacccgtagccgaatttaacactgaaacgacaccagccacaaaccggtttcgctttcattttcaggggccttgcgggactacacttcctgaggcactggcctgccacgaaaacgagacagtgtctgaattctaa

SEQ ID NO: 693 - DNA, 975 bp, synthetic construct
  source 1..975: mol_type = other DNA
cgaagagtcgcttacttttacgatgctgacgtggggaactatgcatacggggctggtcaccccatgaagccacataggatcagaatggcccattcccttatcatgaactatggcctgtataaaaagatggaaatttaccgagccaagccggcaactaagcaagagatgtgccagttccacacagacgagtacatcgacttcttgtcccgcgtgacccctgacaacttggagatgtttaagagggagtcagtcaagtttaacgtgggtgatgattgtccagtgtttgatggcctgtacgaatactgctcaatttctgggggcggttctatggagggcgcggcccgattgaatcgcgggaagtgcgacgtcgcagttaattacgcaggaggactgcaccacgccaagaagtccgaggctagcggtttttgctacttgaacgatatcgtcctgggaatcatcgaactgctcaggtatcaccctcgagttctttatatagacattgacgtacatcacggcgacggcgtcgaagaggccttttacacaactgaccgggtcatgacttgtagcttccataaatacggagaattttttcctggaaccggcgagctgcgcgacatcggagtgggcgctggaaaaaactatgctgttaacgtacctctcagggatgggattgacgatgcaacctatcggtctgtgtttgaaccagtgattaagaagattatggagtggtaccagcctagcgcggtcgtcctgcaatgtgggggcgatagcctgtctggtgacagacttggctgttttaatctgagcatggaaggtcatgctaactgtgtaaactacgtgaagtctttcggaatcccaatgatggtggtaggcggaggcggctatacaatgaggaacgtggcccgcacatggtgctttgaaaccggcctgctgaacaatgtggtgctcgacaaagatctgccttatgagttttaa

SEQ ID NO: 694 - DNA, 669 bp, synthetic construct
  source 1..669: mol_type = other DNA
agcaacagctgggaggaaggatcttccggtagttcctctgacgaggaacatggcgggggcggaatgagagtgggccctcagtaccaggcagtggtgcctgactttgaccctgccaagctggctagacggtcccaggagcgagataaccttggcatgcttgtgtggagccctaatcagaatcttagcgaagctaagctggacgagtacattgcgattgcaaaagaaaagcacgggtacaacatggaacaagccctgggcatgcttttttggcacaagcacaatatagagaaaagtctggctgacttgcccaactttacgccattcccagatgagtggacagtcgaggacaaagtgctgttcgagcaggcctttagttttcacggaaaaacattccataggatccagcagatgctgccagacaaaagtattgcatcattggtgaagttctattattcatggaagaagaccagaactaagacctcagtgatggatcggcacgcacgcaagcagaagcgggagcgcgaggaatcagaggatgagttggaggaagccaacggtaataatcccattgatatagaagttgatcagaacaaagaaagcaagaaggaagtcccacccaccgaaacagtgccccaagtgaaaaaagagaagcatagtactgaattttaa

SEQ ID NO: 695 - DNA, 948 bp, synthetic construct
  source 1..948: mol_type = other DNA
caatctgcttatctgcacgtgtctctggctcgcatcagcgacgaggattgctgtgccaattgcaaagggaactgcctgtccgctgatttcccttgtacctgtgctagggaaacttctggagaatacgcctacacaaaagaaggcctgctgaaagaaaagtttctggacacctgcctcaaaatgaaaaaagaaccagattcatttcctaaagtatactgcaaggattgccctcttgagcgcgaccacgacaagggtacatacgggaagtgcgatggccacctgataagaaagtttattaaagagtgttggagaaaatgtgggtgtgacatgcagtgcggaaaccgagttgttcagcgcgggattcgatgccaactgcaggtctacttcacacaggaaggaaaaggctgggggctgcggacattgcaagatctgcccaaaggcacatttatatgcgagtacattggtgagatcttgacaaataccgaactttatgaccgaaatgtgcgaagctcatcagagcgacacacgtatccggttactcttgacgctgattggggaagtgaaaaggacctgaaggacgaggaagcgctctgtctggatgctaccatttgcggtaatgttgccagattcattaatcaccgctgtgaggacgccaatatgatcgacatccctattgaaattgagacacccgataggcactattaccacattgcatttttcactctccgcgatgtgaaggccatggacgaactgacatgggactatatgatcgatttcaacgataagagccacccagtcaaagccttcagatgctgttgtggttctgaatcatgcagagacaggaaaattaaggggagccagggcaagagtattgagcggagaaagatagtgtccgctaaaaaacagcaggggtccaaggaggtatccaaaaaaaggaaagagttctaa

SEQ ID NO: 696 - DNA, 873 bp, synthetic construct
  source 1..873: mol_type = other DNA
atgcaactgcatgagcagatagctaatatatctgttacatttaacgacataccaaggtcagaccactccatgactcctacagaactgtgttactttgacgactttgccacaactcttgtagttgattctgtactcaatttcactacacataagatgagtaagaagcgaagatatctttaccaggatgaatataggaccgcgcgcactgtgatgaaaacattcagggagcagcgcgattggacaaatgcgatttacggactgctgaccctgcgctcagtatcacacttcctgtccaagctcccacctaataaactctttgaattcagggatcatatagttcggttcctgaatatgttcattctcgacagtggctataccattcaagagtgtaagcgatattctcaggaaggccaccagggcgctaagctggtgtctacaggcgtctggagcaggggggataaaattgagagactgtccggagtcgtctgcctgctgtcctctgaagacgaggattcaatactcgctcaggaagggagcgacttcagcgtgatgtactctacgcggaaaagatgctcaaccctttggttgggcccaggagcctacattaaccacgactgcagacccacctgtgagtttgtcagtcatggcagtactgcccacataagggtgcttagagatatggtcccaggtgatgagataacctgcttctatggctctgaattttttggtccgaacaatattgattgtgagtgctgcacttgtgaaaaaaacatgaatggagcatttagttacctgaggggaaatgagaatgctgagcctatcatttcagagaagaagactaaatatgaactccgctctcgcagtgaattctaa

SEQ ID NO: 697 - DNA, 3039 bp, synthetic construct
  source 1..3039: mol_type = other DNA
ctcgaaaaccaggcgaccgtggagtttcattctggggacaaaacaatggaatgtgagaagctcgggctgagcaaacatacgaccaacgaccggactaaatacatcgacgacacggtgaaacataaagtcaagatcctgaagcgggaatctggggaggggaggaattctagcgactgccgcgacaatgaaatcaaaaagtggcaactggcacccttgcgaaaaatgggacagcctgtacttcccagacgctcaagcgaggaaaaatctgagaagatacccaaggagtcaaccaccgtgacatgtaccggagagaaggcatctaaaccgggaacacatgagaaacaggagatgaaaaaaaagaaagtggagaaaggtgtacttaacgttcaccctgcagcgtccgcgagcaagccaagcgccgatcagattagacaatccgtcaggcattcattgaaggatatattgatgaaacggctgacggactctaacctgaaggtgcctgaagagaaagcagcaaaagtggctaccaagattgaaaaagagctcttttcatttttccgcgacacagacgcgaaatataaaaataagtatcgctctttgatgttcaatctgaaggatccaaagaacaacattctgtttaagaaggttttgaagggtgaagtgacccctgaccacctcatccggatgtcaccagaagagctcgccagcaaagaactggccgcttggcggcgcagagaaaaccgacacaccatagaaatgatagagaaggaacagcgcgaagttgaacgccggccaatcaccaagatcacccacaagggggaaatcgagattgagtctgatgccccaatgaaagagcaggaggctgcgatggaaatccaggaaccggctgccaataagtctctcgagaagccagagggctccgagaaacagaaagaagaagtcgattctatgtccaaagataccacttcacagcaccggcagcatctcttcgatctcaactgtaaaatttgtattggccgcatggctccccctgttgatgatctcagccccaagaaagtcaaggtggtggttggcgtggctaggaagcactctgacaatgaggctgaatccatcgccgatgccctgtcctccacaagcaacatacttgccagcgagtttttcgaagaggagaagcaggaatctcccaagagcactttttctccggctcccagacctgaaatgccggggaccgtcgaagtggaatccacctttctggcaagactgaacttcatctggaaaggcttcatcaacatgccctctgtggctaaatttgtgacgaaggcctatccagtgagcggatctcctgagtaccttactgaggatttgcctgattcaatccaggtgggcgggcgcatttctccccagactgtgtgggactacgtggaaaaaattaaagcctccggtacaaaggagatttgcgtggtccgatttaccccggtaactgaggaggatcaaattagttacaccctgctttttgcttacttcagcagccgaaaacgctatggagtggccgcaaacaatatgaaacaagtcaaggatatgtacctgattccacttggagctactgataaaatcccccatcctttggttccatttgatggcccaggtttggagctccatcgcccgaatctcctgctgggcctcatcatacgccagaagctgaagagacagcacagcgcctgcgcatcaacctcccacatcgcagaaacaccagagagtgccccacctatcgcactgcctcctgataagaagtctaaaattgaggttagcactgaagaagcccctgaggaggagaacgacttctttaattcatttacaactgtgctgcataaacaaagaaataaaccccagcagaatttgcaggaggatcttccaacagctgtggagccactcatggaggttactaaacaagagccacctaagccactgcggtttctccctggagtccttataggatgggagaaccagccaacgactcttgaacttgccaataaaccactgccggtcgacgacatcctccagtcacttcttggaaccaccgggcaggtgtacgaccaagcgcagtctgttatggaacagaatacagtcaaggagatacctttccttaatgagcagacaaactcaaagatagagaaaacagacaacgtggaagtgactgatggcgaaaacaaggagatcaaagttaaggtggataacatttccgaatccacggataaatcagctgagattgagacttccgtggttggctcttcatctattagcgccggctccctgacgagtctgtcactgcggggaaaacctccagacgtgagtactgaagccttcctgacaaacctttccatccagagcaagcaggaggagactgtagagtccaaagaaaagaccctgaaaaggcagttgcaagaagaccaagaaaataaccttcaggataatcagacatccaacagctcaccatgcagatctaacgtcggtaagggcaatattgatgggaatgtctcttgttccgagaatcttgtagctaataccgcgagatcccctcagttcatcaatctgaagagggacccccgacaggcagctggtagatctcaacccgtaactacgtccgagagcaaggacggggattcctgcaggaatggtgagaagcacatgctgcccggcttgagtcacaataaagagcacctgactgaacagatcaacgtcgaagaaaagttgtgcagtgcagaaaaaaatagctgcgttcagcaaagtgacaatctgaaggtcgctcagaattccccgagtgtggagaacattcagacctcacaggccgaacaggcaaaaccacttcaagaggatatcctcatgcaaaacatcgaaacagtgcatccctttcgcaggggctcagcagttgccaccagtcatttcgaggtaggaaacacatgcccaagcgagtttccctccaagtccataacattcacttctaggagcaccagtccacgaacctctaccaattttagttaa

SEQ ID NO: 698 - DNA, 2934 bp, synthetic construct
  source 1..2934: mol_type = other DNA
atgagaactgcagggagagatcctgttcctaggcgctccccgcgatggcgccgggctgttccactctgcgagacaagcgccgggaggcgggtcacccagttgcgcggcgatgatctgaggaggcctgccaccatgaaagggaaagaaagatcccccgtcaaagcaaagcggagtcgcggcggagaggatagcacatctagaggggaacgaagtaaaaaactcggcggtagcggcggcagcaacggatcttcctctgggaagactgattcaggaggggggagtcgcaggtccctgcacctggataaaagtagctcacgcggcggttcacgggagtacgacacaggcggcggcagttcaagttctcggctgcacagttatagcagcccttctacgaaaaactcttcaggaggcggcgaatctcgctcaagttccaggggtggcggtggcgagagcaggtcctcaggggctgccagcagtgctcctggagggggggacggtgcggaatacaaaaccctcaagatctccgagcttggcagtcagctgtcagacgaggctgtggaagacggtctgtttcacgaatttaagagatttggggatgttagcgtgaaaatcagtcatcttagtggcagtggctctggcgacgaacgcgtggccttcgtcaattttcggaggccggaagacgccagggctgcaaaacatgctagggggcggttggtcctttatgaccggccccttaaaatagaagctgtgtacgtaagccggcggagaagtaggagcccgctcgacaaagacacatatccgccatctgcgtccgtggtcggagcctccgtggggggccacaggcaccctcccggaggggggggaggccagagaagcctgagcccaggcggtgccgcactcggctatcgcgattatcggctgcagcaactcgcactgggccgattgcctccacccccacctcccccactgccccgcgatctggaacgagaaagggattatccattttatgagcgggtaagaccagcatactccctggagcctcgcgttggcgccggggctggagctgctccattcagagaggtggacgaaatttcacccgaagacgatcagcgggccaaccgaacactctttctggggaaccttgatattactgtcacagagtcagacctgagacgagcgtttgaccggttcggcgtaattaccgaagtggatataaaaaggcccagtaggggacagacctcaacctacggattcctgaagttcgagaatctcgatatgagccatcgagctaaactggccatgagtggaaaaatcatcatcagaaacccaattaaaatcggttatggcaaggcaacaccaactactcgcctgtgggttggaggcctgggaccctgggtcccattggcagccctggctcgagaattcgaccgcttcgggacgattcggactatcgattaccggaagggcgactcctgggcttacatccagtacgagtccttggatgcagcacatgctgcctggacacacatgaggggattccctttgggagggccagacaggcgcctgagagtggactttgccgacacggaacacagatatcagcaacaatatctgcaaccgctgcccctgacccactacgagctcgttacagacgcatttggccatcgggctcctgatcctctgagaggggctagagatcgcacccctcctctcctgtaccgggaccgagatagagatttgtatccagactctgactgggtaccccctcctccgcccgtccgagagaggagcacccgcaccgccgccacctccgtgcccgcctatgaacctcttgattcactggacagaagacgggacgggtggagtctggacagggaccggggcgatagggacctgccttcttctagagatcagccacgaaaaagacgactccctgaggagtcaggaggtcgccatctcgaccgcagtcccgagtcagacagacctaggaagagacactgcgcgccttctcccgatagaagtccagagctcagttccagtcgcgaccggtataatagcgacaacgataggtcaagcagactgctgcttgagagaccctctcctattagagacagaagaggctccctggagaagagccagggagacaagcgggacaggaaaaatagcgcgagcgccgaacgcgaccgaaagcacagaactacagcccctacagagggcaagtctccgcttaaaaaagaggatagatcagacgggagcgcaccatccacgtcaaccgcgtcttctaagctcaagagtcccagccagaaacaggatggcggcacagctcctgtcgccagtgcaagtccaaagctgtgtctcgcttggcagggcatgcttctgctgaagaactcaaacttcccatccaatatgcacttgctccagggcgatctgcaggtagcatcttcactgctggtagagggctctactggaggtaaggtagcccaactgaagatcacacagcggctgaggctcgaccagccaaaattggacgaagtcacacgccggattaaggtggctggacccaatggctatgccatcctgctggcggtccccggatccagcgattcaaggtcttcctcaagcagcgcagcgtctgatacggccacctcaactcagcggcctctgagaaacctggtgtcctatctgaaacaaaaacaggctgccggagttatcagtttgccagtcgggggcaataaagacaaggaaaacactggcgtgctccacgccttcccaccctgtgagttctcccagcagtttctggacagtcctgctaaggccctggccaaaagcgaggaagactatctggtgatgattattgtgcgaggctttgggtttcaaatcggtgtgcgatacgaaaacaagaaaagggaaaacctcgctttgaccctcctgtaa

SEQ ID NO: 699 - DNA, 1866 bp, synthetic construct
  source 1..1866: mol_type = other DNA
caactccagcaagagaaaccatccttgtacatcggcgtcagggggactgtagttcggagcatgcaagaggtcttgtggactcggctgcgggagctgcccgaccccgtgctgtcagaggaggtagtggaggggatcgctgctggcattgaagccgcgctgtgggatctgacccaggggacgaacggccggtacaaaactaaatatcgctcactgctgtttaacctcagagatcccaggaatcttgatctctttctgaaagtggtgcatggtgatgtcaccccatacgatctcgtgcggatgagttctatgcaactggctccgcaggagcttgctaggtggcgggaccaggaagagaaacggggactcaatattatagaacagcagcagaaagaaccatgtcgcctgcccgcttccaaaatgacccacaagggtgaagtcgaaatccagagagatatggatcaaaccctgaccctggaagatcttgtggggccgcaaatgttcatggactgctctccccaggctttgcccatcgcgagtgaagacacaacgggccagcatgaccaccacttcttggaccccaactgccacatttgcaaagactgggaaccctccaatgagttgctgggttcctttgaggcagcaaagagttgcggtgacaacatatttcaaaaggcactcagccaaaccccaatgcctgctcccgaaatgcccaagaccagggaactgtcacctactgagccacaggacagagttcctccgagcgggcttcacgttccggctgcgcctactaaagcacttccatgtcttccaccttgggagggggtattggacatgttttctatcaagagattcagggcgcgagcgcagcttgtaagcgggcacagttgccggttggttcaggcactcccaaccgtgatcagaagcgccgggtgcatcccgtcaaacatcgtctgggacctccttgccagtatctgccctgccaaggctaaggacgtttgtgtggtgaggctgtgcccccacggcgcacgcgatactcagaactgccgactgctttatagctacctgaatgaccggcagaggcacggactcgccagtgttgaacacatgggcatggtcctgctgccccttcccgccttccagcccttgccaacgcgcctgcgccctctcggaggccctggtctgtgggctttgcccgtgtcccctcttctctctcccgggcttgaggttacccacagtagcctgctcttggcagtactgcttcccaaggagggcctccctgatactgcaggctcttctccctggctgggaaaagttcagaagatggtcagcttcaattccaaggtggagaaacggtactaccaacctgatgatcggagaccaaacgtgcccctgaaaggaactcccccaccgggaggggcctggcaacagagtcagggtcggggaagcatcgctcctagaggaatcagcgcttggcagcggcctccccggggtaggggccggctgtggcctgagcccgagaactggcagcatcctggaagaggtcagtggccaccagaacccggccttcggcagtctcaacacccttacagcgtagctcctgccggtcacggtttcggtaggggccaacacttccaccgggattcctgccctcatcaagccctcctgagacacctcgagtccctcgccaccatgagccatcagctgcaggctctgctgtgcccgcaaacaaaaagcagtattccgcgcccactccaaaggttgagtagtgcactcgccgctccagagcctcctgggcctgccagggactcaagcctggggccgacagacgaagccgggtcagaatgcccctttccccggaaggcttaa

SEQ ID NO: 700 - DNA, 2706 bp, synthetic construct
  source 1..2706: mol_type = other DNA
atggcattgtcaatgaaacccttcagagcggacgattctggcttccagtctaataatctctgggtgggaagcctgacgccagaaaccacggagagtgatctcactgaactgtttggacgatatggcgatatcgaccggatcaccgtctacagcagcagaggattcgcatttatatattatcgccacgtcgaagaggctgtggctgcaaaagaagccctgcagggggccaatttgaacggtagccagattaaaattgagtatgcacgcccggcaaagccatgtaagtccctctgggtcggtggtattggaccaaatgttagcaaggatgatttggaagaagagttcagcaagtttgggaaaatcgaagattttagatttctgcgagagaggaaaaccgccttcatcgattattatgaaatggatgatgctctccaggccaaaagtatgaacggaaaacctatgggtggctcctttttgcgagtagactttctccggagccaggcgcctaagaaagagcaatgggcggggtcctacgacaatcgcaacggaaatatgaatcataagccacagtatccacactcttatgaagattttaagggagatgttcagccctctaaggtactttggattgggtttccaccgacagccactcagtgcaatgatgaacaaatcctgcataatgccatgatactgttcggggaaatcgaacgggtcaagagctaccccagcagaaacttcgccctcgtggaattcaggagcgccgaagaagctagacagtgcaaagaaggccttcagggccgcctcttcaacaaccctcggattaaaattatgtacagtaatgacgaactcccccccgagcaagatgacacctctttttactccggaatgaagcgctctagaacggatatgttcaataacgacccatcttttgtgtcttctccccattctaccggaattccaggatcaatgagacctcttcggggaaccaacgaacgcagctacaacggcgccgagtacaatgatgtggttggcaaagaaccaaattggaggaggccttccgccaatggcacgggaattttgcccagtccgactgggccggggattctcccctcccccgcacaggggactcgccggcccatgcgctccaatccagacagttgggagggttacgacccagcccagctcgtgagggaatctaagcgcacccgccgggacgggtccgtggatggattcacccctatgggggtggatgagaggtccttcggacgcgggtccgtagctgcgcgccccatccgaggccctcccgattccgatcatatctggcgcggaatgatcgccaaaggcggcactccggtgtgctgcgcaagatgcgttccgatgggaaagggaattgaaacaaagctcccagaggtggtcaattgtagtgccagaacggaccttaacatgctcgccaaacactacgcagttgccattggctgcgagattgtcttcttcgtcccggatcgggaagaagattttgcttcctacaccgagttcttgaggtatctgagtagcaaggaccgcgcaggtgtcgctaagcttgacgacgggacgacgctgttccttgtgcctccatctgactttctgacggacgtgcttcaggtcactaggcaggaaagactgtacggtgtggtgctgaagctgccgccacctgctgtccctgtaaccgcaagctacaggcaagaaagccagagtaaccccttgcactacatggaccaggctagagattctcccgcaaacgcttcccatagtttgtatccacctcgggaaaattacattcggggcgctccggaacacctcacagctgcttcaaagccctcagtatccgaaccactcagaattccaaacaatgccgcccctcaggccggtgtctcccttaccccagagctcctcgctacattggcttctatcctgcccgccacttcccagccggcagcccctgagagccaccaacctatgagtgggccctctacagtggtgtccacagctcaccagagcaatgggctttacaatggcgaagccccaagccaagcatggaaacgcgggccccaaaccgtccacgatgcaagcaaccagagcttccagcagtacggcaaccaatatacccccgcggggcagcttcctcccccacccagcagatatcctcctgcctcaaataaccccaactatacatccgggatggtgcacgggaacatgcagtatcagagccagagcgtcaatatgccacagctgtctccactgcccaacatgccacacaataactatagtatgtatacccagggaagctccaaccatccagtgagtcagcccatggttcagcagtatcagcccgaggccagtatgccaaaccagaactatggaccaattcctagttatcaacaggccaactttcacggtgtgacaacaaaccaagcccaaaatctgaatccttctcagttccaggccgctatgcagccgcctgccgataaagccaaccttgaaccacagaaccaggcactgcgactccagcctatgatctctggcgatggccaggggacgacagacggcgaggttgacaaaaaccagcggtaccaaagtacacttcagtttgccgcgaaccttctgctccagattcaacagaaacagcagcagcagtctagcggcacgccagcggggcaaggtccctaa

SEQ ID NO: 701 - DNA, 2463 bp, synthetic construct
  source 1..2463: mol_type = other DNA
atgtctggaagtacccaaccagtcgcgcaaacctggagagcgacagagccgaggtaccctcctcactcactgtcttacccagttcagattgctcggacccacactgacgtcggactgctggagtatcagcaccactcccgggactacgccagccatctgtctcccggaagtatcattcagccccagagaagaagaccgtctctgctgtccgagtttcaacctggcaacgaacgctctcaggagctccaccttagacccgaaagccactcatatctcccggagttgggaaaaagcgaaatggaatttatcgaaagtaagcggcctcgcctggagcttctgccggatccgttgctgagaccctctccattgcttgccacaggccagcctgccgggtccgaagatcttaccaaggaccgatctctgaccggcaagcttgagccagtttccccgccgtctcctccacacaccgacccggagttggaactggtgcccccccgcctgtctaaggaggagctgatccaaaacatggatagggtggacagggagattactatggtggagcagcaaatctcaaaacttaaaaaaaagcagcaacagctcgaagaggaggccgctaagccccccgaaccagaaaaaccggtgtcccccccgcccattgagagtaaacaccggagcctggttcagatcatatatgatgagaaccggaagaaagcggaggctgcccaccgcatccttgagggtctgggcccccaggtggaactccccctgtacaaccagccctccgacacaagacagtatcacgagaatattaagatcaaccaagccatgcgcaagaagttgattctgtatttcaaacgccgcaatcacgcacgcaaacaatgggagcagaaattttgtcagcggtatgatcagttgatggaggcatgggaaaaaaaggtggaaaggatagaaaacaatccacggcgaagggccaaggaaagcaaagtgcgggaatactatgaaaagcaattccccgaaatccggaagcagagggagctgcaagaaagaatgcaatcccgcgtgggacaacggggctctgggttgtccatgtctgcagctagatccgaacacgaggtgagcgaaattatcgacggcctctccgaacaggagaacctggaaaagcagatgagacagctggccgttatcccgcccatgctctatgacgcagatcagcagcgcattaaattcatcaacatgaacggactgatggccgatccaatgaaagtctataaggacagacaagtgatgaacatgtggagcgagcaggaaaaggagaccttccgggagaagtttatgcagcacccaaaaaattttggtcttatcgcctctttcctggaacggaagacggttgctgagtgcgtgctctattactatctgactaagaaaaatgaaaattacaagtcactggtaagacggtcctacaggcgcagaggaaagtctcaacagcagcagcaacagcagcagcagcagcagcaacaacagcagcaacaacctatgccgcgaagctctcaggaggagaaagacgaaaaggaaaaggagaaagaggctgagaaagaggaagaaaagcctgaggtggaaaatgacaaggaggatctgctgaaagaaaaaacagacgatacatccggtgaggataacgatgagaaagaagctgtggcttctaaggggcggaagacggcgaattctcagggccggagaaagggcaggatcaccagaagcatggccaacgaagccaattccgaggaggccattacgccccagcaatcagctgaactggcttccatggagttgaatgagagttctagatggactgaggaggagatggaaactgccaagaaaggcctgcttgagcacggccggaactggtctgctattgctcgcatggtggggtcaaagaccgtcagtcagtgtaagaatttctactttaactacaagaagagacagaatctggatgagattctgcagcagcacaaacttaagatggagaaggaaagaaacgcccgccggaagaaaaaaaaggcacctgctgctgccagcgaagaggctgcattcccgccagtagtggaagacgaagagatggaagcgtccggggtatccggtaacgaagaggaaatggtcgaagaagccgaggcgttgcacgcatctgggaacgaggtcccgcgaggcgaatgcagcggacccgctacggtgaacaattcatcagacactgagagcattcccagcccacacaccgaagcggctaaagacactggacagaacggcccaaaacctccggcaactttgggcgcagatggaccccccccgggtcccccaactcctccccctgaggacatcccagcccccaccgagccgactcccgcgagtgaggccaccggtgcgccaacacctccacccgctccaccatccccctcagctcctcccccctaa

SEQ ID NO: 702 - DNA, 2649 bp, synthetic construct
  source 1..2649: mol_type = other DNA
gtggtccccaaggaagagaaggaggaggagaccgccgctgccccccccgtggaggagggcgaggagcagaagcctccagcggccgaagaattggctgtagacacaggcaaagccgaggaaccggtgaagtctgaatgtactgaagaggccgaggagggcccagctaaaggaaaggatgcagaagccgctgaggcaactgccgagggcgctctgaaggcagaaaagaaagagggcggatccggccgagccactacagctaagtcatcaggtgcgcctcaggactctgattcttctgccacatgcagcgcagatgaggtagatgaggcagagggtggagacaagaaccggcttctgtctccccgcccctctctgttgacaccgacaggggatccacgcgccaatgccagcccgcagaagccactggatttgaagcagctgaagcagagggccgctgccataccccccatccaggtgactaaagtccatgagcctcccagggaggacgccgctcccacaaagcccgctccccccgcgccgccccctccacagaatctccaacctgaatccgatgccccccaacagccaggcagtagccccagaggaaaatcacgctccccagccccccctgcagataaggaagcatttgccgccgaggcccagaagttgccgggagaccccccctgttggacctccggcctgccgtttcccgtgccccctagggaggtcatcaaagcctctcctcacgcgccggatccgtccgctttcagttatgcacctcccgggcaccccctgcctctcggactccatgacacagcacgacccgtactgccacggccgcctacaatcagcaatccaccccccctgatttcaagcgccaaacacccgtctgtcctggagcgccagataggagcaatcagccaagggatgtcagtccagcttcacgtgccttattctgagcacgctaaagcccccgtgggtcctgtcacgatgggtctgcccttgccaatggaccccaaaaagctcgcccccttctctggtgtcaagcaggagcagttgtctccccgggggcaggccggcccacccgaatctctgggagtccccaccgctcaggaggcctctgttctgagaggtacggctctgggaagcgtgcccggaggatctatcaccaagggtataccctctacacgcgtcccatccgactccgctatcacatacaggggctcaatcacccacggcactcctgccgatgtgctctataagggcaccatcactcggattatcggcgaagactcaccttctcggttggatagaggccgggaggatagtctccctaagggtcatgtcatctacgaaggcaaaaaaggccatgtccttagttatgaagggggaatgtccgtcacccagtgttctaaggaggacggaagatcaagttctggcccacctcacgaaactgccgcgcccaagaggacttatgacatgatggagggcagggtgggcagagccatctcttccgcaagtatcgaaggtctcatgggtagggctattcctccagaaagacactcccctcatcacctgaaggagcaacaccatattagaggctccataacacagggcatcccccgatcctacgtcgaagctcaagaagactacctgcggagagaggctaagctgttgaaaagggaggggaccccaccaccaccacccccgtctcgcgatctcaccgaggcttataagacacaggctctgggcccactgaaactcaagcctgcgcatgaggggctggtggcaaccgtgaaagaagctggccgcagtatacacgagatccctcgggaggaacttcgacacactcctgaactgccgctggccccccgacctttgaaagagggctcaataactcaggggacccccctgaaatatgatactggtgccagtaccactgggtctaaaaagcacgatgttaggtctctcatcggatcacctgggcggacctttccaccggtgcaccctctggacgtcatggcagatgctagagccctcgagcgagcttgctatgaggagtcactgaagtctcgacccggaacagcatcaagtagcggggggtccattgctaggggcgcgcccgtcatagtccccgaactgggaaaaccgcgccagagccccctgacctatgaagatcacggcgccccattcgccggacatcttccacgcggctctcctgtcaccacccgggagcctacacctcggctgcaagaaggtagcctctcctccagcaaggcttcacaagaccgcaagttgacgagcactccccgggagatcgcaaaatccccgcacagcactgtacccgaacaccatccacatccaattagtccctatgagcacctgctccggggcgtgtccggtgtcgacctctatcggtctcacattccccttgccttcgaccccacaagcattcctcgaggcatccctctcgatgctgctgctgcctattacctgccaaggcatctggctccaaatccaacttatcctcacttgtatcctccctacctcataagggggtatcccgatacagcagccctggagaatcgccaaactatcattaacgactatattacctcccaacagatgcaccataatgctgccacagcttaa

SEQ ID NO: 703 - DNA, 2439 bp, synthetic construct
  source 1..2439: mol_type = other DNA
atggcccaacgcgcagatatgctgagaggactgtcccctcgagaaagctcactggccttgaattacgccgccgggccccgggggattattgatctgagtcaagtaccacatcttccagtgctggttccgcccacacctgggactccagctacagctatggaccggctggcataccttcctaccgcaccccagcctttcagtagcagacactcttcctccccactttcccccggcgggcccacacaccttactaagccgacaaccacatctagctctgagcgcgagcgagatcgcgatcgagaaagagacagagatcgggagagagaaaagtccatactcacatctactacaactgtggagcacgctcccatctggagacccgggacagaacagagctctggatcttccggggggggcggggggagttcatccagacccgccagccactctcatgcccaccagcatagccctatctcaccgcggacccaggacgccctgcagcagaggccaagtgtgctgcataacacaggtatgaagggaattattacagccgtggaaccctcaacgccaacagttcttaggtcaacaagcacctccagcccagtgagaccggccgccactttcccgcctgccacgcactgccccttgggcggcacgctggatggagtctaccctacgctgatggaaccagtgcttcttccaaaggaggctcctcgggtggcccgaccagaacggccaagggctgacaccgggcacgcttttctggccaagccccccgctagatccggcctcgagcccgcctcttctccatcaaaggggtccgaaccccgaccattggtgccaccagtgagtggccatgcgactatagctagaacccctgctaagaatctggcccctcaccacgcatcccctgatcccccggccccccctgccagtgctagcgaccctcacagagagaagactcagagtaaacccttcagtatacaggagctggagctgcgctccctcggatatcatgggtcaagctattcaccagaaggggtcgaacctgtgtctcccgtgtcatcacctagcctgacacatgacaaagggctccctaaacatctggaggagctggacaagagccacctggagggtgagctgagacctaagcagccaggacctgtcaaactggggggcgaagctgcccacctgcctcacctgcggccccttccagagtcacagccttccagttcacctctcctgcagaccgcccccggcgttaagggccatcagcgggtggtgactctcgcccagcacattagtgaagtaatcacgcaggattatactcggcatcacccccagcaactgagcgctccccttccggcaccgctgtactctttcccaggcgcctcatgcccagtgctggatctgcgcaggcccccatccgacctgtacctgcccccccccgatcacggggctcctgcccggggcagccctcacagtgagggaggcaaaagatctcctgagcctaacaaaacatcagtgttgggtggaggagaagacgggattgagccagtcagcccaccagagggaatgacagaacccggacacagcaggagcgcagtatatcccttgctgtaccgcgatggcgaacagacagagccttccaggatggggtcaaaatccccaggcaatacatctcagccaccagccttcttctccaaacttacagagtccaatagcgcaatggtgaaatctaagaagcaagaaataaacaagaaactcaatacccacaaccggaatgaacctgaatataacatctcccagccaggcacggagatatttaacatgcctgctattacaggtacaggccttatgacttaccggtctcaagccgtccaggaacatgccagtaccaacatggggctcgaggctattataagaaaggcactgatgggaaagtacgatcagtgggaagaatctcctcccctcagtgccaatgcttttaacccacttaatgccagcgccagcctccctgcagccatgccaattaccgcagccgatggtcggtctgaccacactctcacctcccccggcggagggggaaaagcgaaagtaagcggtaggccatcctctagaaaagccaaatccccagcccctgggctggctagcggagatcgccctcccagcgtgtcatctgtgcattcagagggcgactgcaacaggcgcaccccccttaccaaccgggtatgggaagataggccatccagtgcgggctccacccccttcccttataatcccctcatcatgaggctgcaggccggcgttatggccagccctccaccccccggcctgcccgcaggatccggaccgctggccggtccacatcatgcatgggatgaggagcccaagccactgctgtgtagccaatatgagactctcagtgactccgagtaa

SEQ ID NO: 704 - DNA, 1287 bp, synthetic construct
  source 1..1287: mol_type = other DNA
atggcaaaaaccgttgcttatttttacgaccctgacgtgggtaatttccattatggtgccggccatccgatgaaaccccacaggctggctttgacacatagtttggttctgcactatggtttgtacaaaaaaatgatcgtgttcaaaccctatcaagcatcccaacatgacatgtgtcggtttcactctgaagactacattgattttctgcagcgagtgagtcctacaaacatgcagggatttaccaagagtctcaatgccttcaatgtgggtgatgactgtcctgtgtttcctggattgttcgaattttgctcccggtacaccggcgcctccctgcagggggctacacagctgaataataagatttgtgacatcgctataaattgggctggaggcctgcaccacgccaagaaatttgaagcctctgggttttgttatgtgaacgacattgtcatcggaattctggaactgctgaagtaccatcctagagtgctgtacattgacatcgacatacaccatggggacggcgtgcaggaggccttttatctcactgaccgggtgatgaccgtctcatttcacaaatacgggaactatttcttcccaggcactggagatatgtatgaagtcggggccgaaagtggccgctactactgtcttaatgtgccgctgagagacgggattgacgatcaaagctataaacacctgttccaacctgtaatcaatcaggttgtcgacttctaccagcccacttgtatcgtactccagtgtggcgcggactcacttgggtgcgatcggctgggatgcttcaatctcagcataaggggtcacggggagtgtgtcgagtatgtgaaaagcttcaacatcccactcctggtgttgggaggagggggatataccgtaaggaacgtggctaggtgttggacgtatgaaaccagcctcttggtggaggaggccatcagcgaggagctcccctatagtgaatattttgagtacttcgctcctgactttacgctccatccagatgtcagtaccaggatcgagaatcagaactcacgccagtacctggaccagatcaggcagactatcttcgagaatctgaaaatgctgaatcatgcgccttccgtccaaatacacgacgtacccgccgacctgttgacatacgatcggaccgacgaagctgacgcagaggagaggggccctgaagagaactatagtcgccccgaggctcctaatgagttttacgacggtgatcatgataacgacaaggagtctgacgtcgaaatttaa

SEQ ID NO: 705 - DNA, 426 bp, synthetic construct
  source 1..426: mol_type = other DNA
atggcgagcccctctaaaggaaatgacttgtttagtccagatgaagagggcccagcagttgtggccggtcccggcccgggccccgggggagctgagggcgccgccgaggaacggcgggtgaaggtttcctcactgcctttttccgtggaggccctgatgtctgacaaaaagccacccaaggaggcgagtcctctgcccgcagagagcgcatctgctggggctactctgcggcctcttctgctctctggacacggggccagggaagcccatagccccggacccctggtcaaaccatttgaaacagcctctgttaagagcgagaattccgaggatggcgccgcctggatgcaagagcccgggcggtactcacctcccccaagacatatgtcaccgaccacttgcacccttcgcaaacacaagacttaa

SEQ ID NO: 706 - DNA, 201 bp, synthetic construct
  source 1..201: mol_type = other DNA
gaggcggaactcgagaagctgaaaatggccgctaagcccatgttgccaagttcattcagtctcccattccctatcagctctcccctgcaggcagctagtatttacggagccagctatccattccacagacccgtcctcccaatcccacccgtcgggctctacgcaactcctgtgggatacggtatgtaccacctctcataa

SEQ ID NO: 707 - DNA, 3162 bp, synthetic construct
  source 1..3162: mol_type = other DNA
tccaccaaggaagatagacgcagcgaagaaaaggccgccgccatggcagcctccaaaaagacggcccctccaggcagcgctgtcggcaaacagccggccccgcggaatctcgtcccgaagaagtcttctttcgccaatgtagctgccgccacacccgccattaaaaagccccccagtggctttaaagggactatccccaagagaccttggctgtctgcgacaccttcatccggcgcttctgccgcccggcaggccgggccagcccccgctgccgctacagcagcgtctaaaaagttccctgggtccgcagctctcgtgggagccgtcaggaaaccggtggtgcccagtgttcccatggccagccccgcacctggtaggctgggcgcaatgtccgccgcacctagtcagcccaatagccaaattcgacagaatatccggcgcagccttaaagaaatcttgtggaagagggtaaatgactcagacgacctgattatgacagaaaatgaggtagggaagatcgcactgcatatcgagaaagagatgttcaatttgttccaggtgactgacaacaggtacaaaagcaagtacagaagtatcatgtttaacctcaaagatcctaagaatcaaggactgttccacagagtcttgcgggaggaaattagcttggcaaaactggtgcggctgaaacccgaggagctggtaagtaaagagctgtcaacatggaaggaacggccagccagatctgtgatggaatcaagaacaaagctgcataatgaatcaaagaagactgcgccacggcaagaggccattcctgatctggaagacagccccccagtgagtgactctgaagagcaacaagaatccgccagggccgtgccggaaaaaagtactgcaccactcctggatgtgttctcttctatgcttaaagacactacaagccagcacagagcccacttgtttgacctgaactgcaaaatttgcaccggccaggtcccgtctgccgaggacgagcccgcacccaagaagcaaaaattgagcgcttccgttaaaaaagaggatcttaaatcaaagcacgatagcagcgcaccagacccggcacccgactctgcagatgaggttatgcctgaggcagtgcccgaagtggcctcagagccgggactggagagtgccagccaccctaacgtcgatcggacctattttcctggtcctccaggcgacggtcacccagagccatctcccctcgaagatctgtcaccctgccctgcgtcctgtggcagtggggtggtcacgactgtgaccgtgagtggaagagacccacggaccgccccctcctctagttgtactgccgtggcttctgcggcaagccgccctgatagtacacacatggtagaggccagacaggacgtgcctaagccagtgctgacctctgtgatggtccctaagtcaatcctcgctaagccgtcaagttcccccgatccgcggtatttgtcagtacccccaagccccaacataagtacatcagagagcagatctcctcccgagggagatactaccctgttcctgtctcgcctgagcacaatttggaagggtttcatcaatatgcagtccgtcgccaaatttgtgacaaaagcatatcccgtttccggctgcttcgattatctgagcgaggatcttccagacacaatccacatcggagggagaatcgcccctaaaaccgtgtgggattatgtgggtaaactgaaaagctccgtgtctaaagagctctgcctgatcaggttccatcctgcaactgaagaagaagaggttgcttacatttctctctactcttatttttcttccagaggtagattcggtgtggttgccaacaataatagacatgtaaaagacctgtatctcattcctctgtccgcccaggaccccgtcccaagcaagctcttgccattcgaggggccaggactcgagagtcccagacccaacattattctggggctcgtcatctgccaaaagattaagcgccccgccaatagtggagaattggacaaaatggatgaaaagcgcactagactgcagcccgaggaagctgacgtgccagcctatccaaaggtggctaccgtcccacagagtgagaagaagcctagcaagtatcctctgtgctccgcagacgcagctgtgagcaccacacctcctggtagtcctcctccccccccaccactgcctgagccccccgttcttaaagttctgtcttctctgaagccagcagcaccaagccctgccactgcggccacaaccgccgcggccgcctctactgcagccagctccaccgcgagcagtgcttctaaaactgccagccccttggagcacatattgcagaccctgtttggcaaaaagaagtcatttgatcccagcgcaagagagcctcccggatctaccgcaggactgccacaggaaccaaagacaactgccgaggacggcgtccctgcgccccccctgctcgaccctattgtacaacaatttgggcagttcagcaaggataaggcacttgaggaggaggaagatgacagaccatatgatcctgaagaagagtatgaccctgagcgcgcttttgatacacagctggtggagaggggaaggcgacacgaggtagagcgggcaccagaagccgctgccgctgaaagggaggaggtcgcatatgatcctgaggacgaaactattttggaggaggcgaaagttacagtcgatgacctgcccaatagaatgtgcgccgatgtcagacggaattccgttgaacgaccggcggaaccagtggccggagcagctacacctagcttggtggagcagcagaagatgcttgaagaactgaacaaacagattgaagagcaaaagcggcagctggaggaacaagaagaggcgctgcgacagcagagagcggctgttggggtgtccatggcccacttttcagtatctgatgccctgatgagcccgcccccaaagtcatcccttccaaaggccgaactgttccagcaggagcaacagagtgcagataagccagcaagtctccccccagcctcccaggccagtaatcacagagaccctcgccaagcccggagattggccaccgaaactggggaaggcgaaggcgagcccctcagtaggttgtcctaa

SEQ ID NO: 708 - DNA, 1764 bp, synthetic construct
  source 1..1764: mol_type = other DNA
atggccaggatgctgcaggacgtcttcgaaactcacttcagcaagattcccatcgagcccgtggagagtatgccactgtgctacattaagactgatatcaccgaaaccacaggccgggagaatacaaacgaggcatcctccgagggcaatagttctgatgattccgaagacgaaagagtgaaacggctggcaaagctccaagagcagctgaaggctgtgcaccagcagctccaggttctttctcaagtgccattcaggaagctgaataaaaagaaagaaaaatcaaagaaggaaaagaagaaagaaaaagtcaataacagcaatgaaaatccacggaagatgtgcgaacagatgcgcctgaaggagaagtccaagaggaatcagcctaagaaaaggaagcagcagtttatcggccttaaatccgaagacgaagataatgccaagcccatgaattacgacgagaaacggcagttgtccctgaatattaacaagctgcccggggacaagcttggccgagtggtccatataattcagtctagagaaccctccctctccaattcaaacccggacgagatcgagattgatttcgaaacgttgaaggcttccacgctcagggaactggagaagtatgtgtccgcatgcctgagaaagagaccgcttaagcctcctgctaagaaaatcatgatgtccaaggaagagctccactctcaaaaaaagcaagagctcgagaagcggctgctcgatgtaaataatcagttgaatagtaggaagaggcaaaccaagtctgacaagactcaacccagtaaagccgtggaaaacgtgagccgactcagcgagtcatcatcctccagcagtagctcctctgaaagtgaaagcagttcaagcgatcttagttctagtgatagcagcgactctgagtcagaaatgtttcccaagtttactgaggtgaaacccaacgattctcccagcaaggaaaacgttaaaaaaatgaagaacgagtgtattccacctgaagggagaactggcgtaacgcagattgggtactgcgttcaggataccacctcagcaaacacgaccctggtgcatcagactacgccctcccatgtaatgcctcccaatcaccatcagcttgcttttaattaccaggaattggagcatttgcagactgtcaagaatatttcaccactgcagattctcccaccatccggggattctgagcaactctccaacggaattaccgtcatgcacccttccggagatagcgatacgacgatgcttgaaagcgaatgtcaggcccccgttcagaaggacatcaagattaagaatgccgactcatggaagtctctggggaagcccgttaagccctctggcgtcatgaaatcctccgacgaactttttaatcagtttagaaaagccgctatcgaaaaagaagtgaaagcccgcacccaggagctgattagaaagcatctcgagcagaacaccaaggagcttaaagcgtctcaggaaaaccagcgcgacctgggcaatggcctgactgtggaatccttttctaataaaatccagaataaatgctctggcgaagagcaaaaagaacatcaacaatcaagcgaagcacaagacaaatccaagctgtggcttctcaaggatcgggatcttgctcggcagaaagaacaggagcgccgcaggcgcgaggcgatggtcggaaccatagatatgacactgcagtctgacataatgaccatgtttgaaaacaattttgactaa

SEQ ID NO: 709 - DNA, 837 bp, synthetic construct
  source 1..837: mol_type = other DNA
atgaagaaaaaccgcgcctttctgaagtgggcggggggaaaatacccccttctggacgacattaaacgccacctccctaagggagagtgcctggtcgagccctttgttggtgccgggtcagtgttcctgaacaccgattttagcagatatatcctcgccgatattaattcagacttgatttcactgtacaacatagtgaagatgaggacagacgagtacgtccaggcagcccgcgagcttttcgtgccagagacgaactgtgccgaagtgtactaccagttcagggaggagttcaataagtctcaagatcccttcagaagggcagtgctgttcctgtacctgaacagatatggatacaatggcctgtgtcgctacaacctgaggggggagtttgcagtcccctttggccgctataaaaaaccatactttcccgaggcagagctgtatcactttgctgagaaggcccaaaacgcttttttttattgcgagtcttatgccgactcaatggccagagccgacgatgcgtcagtcgtgtattgtgacccgccatacgcaccgctgtctgcaactgcgaatttcaccgcatatcatacgaattcattcaccctggagcagcaagcccacctggccgaaatcgcagagggcctcgtggagagacatatcccagtactcatttccaaccatgacacaatgctgacacgcgagtggtatcagagagcaaagctccacgtggtcaaggtccggcggagcatcagctccaacggcggtacacgcaagaaggtcgacgagcttctcgccttgtataagccaggcgtcgtaagtcctgcaaagaagtaa

1. A method of determining that a candidate polypeptide in a library of polypeptides has editing activity, the method comprising:
(a) expressing in a plurality of cells:
(i) a library of first expression cassettes each comprising a nucleic acid encoding a polypeptide wherein each polypeptide in the library comprises, in order, a first editing domain, a first linker, a nuclease-deficient RNA guided endonuclease domain, a second linker, and a second editing domain; and
(ii) a second expression cassette comprising a nucleic acid encoding a guide RNA directed to a target of interest, wherein said first and second expression cassettes are expressed in the plurality of cells;
(b) separating the plurality of cells based on the expression level of the target of interest;
(c) extracting genomic DNA (gDNA) from the plurality of cells; and
(d) sequencing the gDNA of cells that have a high level of expression or a low level of expression of the target of interest thereby determining that the candidate polypeptide has epigenetic editing activity.

2. The method of claim 1, wherein cells that have high a level of expression are in the top 25% of the plurality of cells that have the highest level of expression and cells that have low expression are bottom 25% of the plurality of cells that have the lowest expression.

3. The method of claim 1, wherein the target of interest is a gene operably linked with a sequence encoding a fluorescent protein.

4. The method of claim 1, wherein the target of interest is a gene that is not operably linked with a sequence encoding a fluorescent protein.

5. The method of claim 1, wherein the first expression cassettes do not comprise a nucleic acid encoding a barcode sequence.

6. The method of claim 1, wherein the plurality of cells is selected from the group consisting of a plurality of mammalian cells, a plurality of plant cells, a plurality of insect cells, a plurality of eukaryotic cells, a plurality of yeast cells, a plurality of bacterial cells, and a plurality of fungal cells.

7. The method of claim 1, wherein the library comprises first expression cassettes encoding at least 1000 unique polypeptides.

8. The method of claim 1, wherein the library comprises first expression cassettes encoding at least 10000 unique polypeptides.

9. The method of claim 1, wherein the library comprises first expression cassettes encoding at least 100000 unique polypeptides.

10. The method of claim 1, wherein the first editing domain is selected from the group consisting of an enzymatic domain of a polypeptide listed in Table 4.

11. The method of claim 1, wherein the second editing domain is selected from the group consisting of an enzymatic domain of a polypeptide listed in Table 4.

12. The method of claim 1, wherein the nuclease-deficient RNA guided endonuclease domain is a nuclease-deficient CRISPR/Cas effector polypeptide.

13. The method of claim 12, wherein the CRISPR/Cas effector polypeptide is a class 2 nuclease-deficient CRISPR/Cas effector polypeptide.

14. The method of claim 13, wherein the class 2 nuclease-deficient CRISPR/Cas effector polypeptide is a CRISPR/dCas9 effector polypeptide.

15. The method of claim 13, wherein the class 2 nuclease-deficient CRISPR/Cas effector polypeptide is a CRISPR/dCas12 effector polypeptide.

16. The method of claim 1, wherein the guide RNA is a single guide RNA.

17. The method of claim 1, wherein the first expression cassette is contained on a viral vector.

18. The method of claim 1, wherein the second expression cassette is contained on a viral vector.

19. The method of claim 17, wherein the first and second expression cassettes are contained on the same viral vector.

20. The method of claim 17, wherein the viral vector is a lentivirus expression vector.

21. The method of claim 1, wherein the sequencing reaction is a long read sequence reaction.

22. The method of claim 1, wherein the genomic DNA comprises the target of interest.

23. The method of claim 1, wherein the first and second linker are an XTEN linker.

24. The method of claim 1, further comprising sequencing the second expression cassette.

25. The method of claim 1, wherein the editing domain is an epigenetic editing domain.

26. The method of claim 1, wherein the editing domain is a transcriptional editing domain.

27. The method of claim 1, wherein the separating comprises sorting the cells using flow cytometry.

28. A library, the library comprising:
a plurality of expression cassettes each comprising a nucleic acid encoding a polypeptide wherein each polypeptide comprises, in order, a first editing domain, a first linker, a nuclease-deficient RNA guided endonuclease domain, a second linker, and a second editing domain;
wherein the plurality of expression cassettes comprise at least 1000 different combinations of first and second editing domain combinations.

29. The library of claim 28, wherein the first editing domain is any one of N1-N349 as defined by Table 4.

30. The library of claim 28, wherein the second editing domain is any one of C1-C349 as defined by Table 4.

31. The library of claim 28, wherein the first and second linked is an XTEN linker.

32. The library of claim 28, wherein the nuclease-deficient RNA guided endonuclease domain is a nuclease-deficient CRISPR/Cas effector polypeptide.

33. The library of claim 32, wherein the CRISPR/Cas effector polypeptide is a class 2 nuclease-deficient CRISPR/Cas effector polypeptide.

34. The library of claim 33, wherein the class 2 nuclease-deficient CRISPR/Cas effector polypeptide is a CRISPR/dCas9 effector polypeptide.

35. The library of claim 32, wherein the class 2 nuclease-deficient CRISPR/Cas effector polypeptide is a CRISPR/dCas12 effector polypeptide.

36. The library of claim 28, wherein plurality of expression cassettes comprise at least 10000 different combinations of first and second editing domain combinations.

37. The library of claim 28, wherein plurality of expression cassettes comprise at least 100000 different combinations of first and second editing domain combinations.
